(19) United States
(12) Patent Application Publication
(10) Pub. No.: US 2005/0244935 A1
(43) Pub. Date: Nov. 3, 2005

(54) Corynebacterium glutamicum genes encoding proteins involved in membrane synthesis and membrane transport

(75) Inventors: Markus Pompejus, Freinsheim (DE); Burkhard Kroger, Limburgerhof (DE); Hartwig Schroder, Nussloch (DE); Oskar Zelder, Speyer (DE); Gregor Haberhauer, Limburgerhof (DE)

Correspondence Address: LAHIVE & COCKFIELD, LLP., 28 STATE STREET, BOSTON, MA, 02109, US

(73) Assignee: BASF AG, Ludwigshafen, DE (US)

(21) Appl. No.: 11/082,389

(22) Filed: Mar. 16, 2005

Related U.S. Application Data
(63) Continuation of application No. 09/603,024, filed on Jun. 23, 2000.
(60) Provisional application No. 60/141,031, filed on Jun. 25, 1999.
(60) Provisional application No. 60/143,262, filed on Jul. 9, 1999.
(60) Provisional application No. 60/151,281, filed on Aug. 27, 1999.

(30) Foreign Application Priority Data
Jul. 1, 1999 (DE) 19930487.4
Jul. 1, 1999 (DE) 19930489.0
Jul. 8, 1999 (DE) 19931549.3
Jul. 8, 1999 (DE) 19931550.7
Jul. 9, 1999 (DE) 19932134.5
Aug. 31, 1999 (DE) 19941379.7
Sep. 3, 1999 (DE) 19942088.2
Sep. 3, 1999 (DE) 19942097.1

(51) Int. Cl. C12P 13/04; C07H 21/04; C12N 9/10; C12N 1/21

(52) U.S. Cl. 435/106; 435/193; 435/252.3; 536/23.2

(57) ABSTRACT

Isolated nucleic acid molecules, designated MCT nucleic acid molecules, which encode novel MCT proteins from Corynebacterium glutamicum are described. The invention also provides antisense nucleic acid molecules, recombinant expression vectors containing MCT nucleic acid molecules, and host cells into which the expression vectors have been introduced. The invention still further provides isolated MCT proteins, mutated MCT proteins, fusion proteins, antigenic peptides and methods for the improvement of production of a desired compound from C. glutamicum based on genetic engineering of MCT genes in this organism.

### RELATED APPLICATIONS

[0001] This application is a continuation of U.S. patent application Ser. No. 09/603,024, filed Jun. 23, 2000, which claims priority to prior filed U.S. Provisional Patent Application Ser. No. 60/141,031, filed Jun. 25, 1999, U.S. Provisional Patent Application Ser. No. 60/143,262, filed Jul. 9, 1999, U.S. Provisional Patent Application Ser. No. 60/151,281, filed Aug. 27, 1999, German Patent Application No. 19930487.4, filed Jul. 1, 1999, German Patent Application No. 19930489.0, filed Jul. 1, 1999, German Patent Application No. 19931549.3, filed Jul. 8, 1999, German Patent Application No. 19931550.7, filed Jul. 8, 1999, German Patent Application No. 19932134.5, filed Jul. 9, 1999, German Patent Application No. 19941379.7, filed Aug. 31, 1999, German Patent Application No. 19942088.2, filed Sep. 3, 1999, and German Patent Application No. 19942097.1, filed Sep. 3, 1999. The entire contents of all of the aforementioned applications are hereby expressly incorporated herein by this reference.

### BACKGROUND OF THE INVENTION

[0002] Certain products and by-products of naturally-occurring metabolic processes in cells have utility in a wide array of industries, including the food, feed, cosmetics, and pharmaceutical industries. These molecules, collectively termed ‘fine chemicals’, include organic acids, both proteinogenic and non-proteinogenic amino acids, nucleotides and nucleosides, lipids and fatty acids, diols, carbohydrates, aromatic compounds, vitamins and cofactors, and enzymes. Their production is most conveniently performed through the large-scale culture of bacteria developed to produce and secrete large quantities of one or more desired molecules. One particularly useful organism for this purpose is Corynebacterium glutamicum, a gram positive, nonpathogenic bacterium. Through strain selection, a number of mutant strains have been developed which produce an array of desirable compounds. However, selection of strains improved for the production of a particular molecule is a time-consuming and difficult process.

### SUMMARY OF THE INVENTION

[0003] The invention provides novel bacterial nucleic acid molecules which have a variety of uses. These uses include the identification of microorganisms which can be used to produce fine chemicals, the modulation of fine chemical production in C. glutamicum or related bacteria, the typing or identification of C. glutamicum or related bacteria, as reference points for mapping the C. glutamicum genome, and as markers for transformation. These novel nucleic acid molecules encode proteins, referred to herein as membrane construction and membrane transport (MCT) proteins.

[0004] C. glutamicum is a gram positive, aerobic bacterium which is commonly used in industry for the large-scale production of a variety of fine chemicals, and also for the degradation of hydrocarbons (such as in petroleum spills) and for the oxidation of terpenoids. The MCT nucleic acid molecules of the invention, therefore, can be used to identify microorganisms which can be used to produce fine chemicals, e.g., by fermentation processes. Modulation of the expression of the MCT nucleic acids of the invention, or modification of the sequence of the MCT nucleic acid molecules of the invention, can be used to modulate the production of one or more fine chemicals from a microorganism (e.g., to improve the yield or production of one or more fine chemicals from a Corynebacterium or Brevibacterium species).

[0005] The MCT nucleic acids of the invention may also be used to identify an organism as being Corynebacterium glutamicum or a close relative thereof, or to identify the presence of C. glutamicum or a relative thereof in a mixed population of microorganisms. The invention provides the nucleic acid sequences of a number of C. glutamicum genes; by probing the extracted genomic DNA of a culture of a unique or mixed population of microorganisms under stringent conditions with a probe spanning a region of a C. glutamicum gene which is unique to this organism, one can ascertain whether this organism is present. Although Corynebacterium glutamicum itself is nonpathogenic, it is related to species pathogenic in humans, such as Corynebacterium diphtheriae (the causative agent of diphtheria); the detection of such organisms is of significant clinical relevance.

[0006] The MCT nucleic acid molecules of the invention may also serve as reference points for mapping of the C. glutamicum genome, or of genomes of related organisms. Similarly, these molecules, or variants or portions thereof, may serve as markers for genetically engineered Corynebacterium or Brevibacterium species.

[0007] The MCT proteins encoded by the novel nucleic acid molecules of the invention are capable of, for example, performing a function involved in the metabolism (e.g., the biosynthesis or degradation) of compounds necessary for membrane biosynthesis, or of assisting in the transmembrane transport of one or more compounds either into or out of the cell. Given the availability of cloning vectors for use in Corynebacterium glutamicum, such as those disclosed in Sinskey et al., U.S. Pat. No. 4,649,119, and techniques for genetic manipulation of C. glutamicum and the related Brevibacterium species (e.g., lactofermentum) (Yoshihama et al, J. Bacteriol. 162: 591-597 (1985); Katsumata et al., J. Bacteriol. 159: 306-311 (1984); and Santamaria et al., J. Gen. Microbiol. 130: 2237-2246 (1984)), the nucleic acid molecules of the invention may be utilized in the genetic engineering of this organism to make it a better or more efficient producer of one or more fine chemicals. This improved production or efficiency of production of a fine chemical may be due to a direct effect of manipulation of a gene of the invention, or it may be due to an indirect effect of such manipulation.

[0008] There are a number of mechanisms by which the alteration of an MCT protein of the invention may directly affect the yield, production, and/or efficiency of production of a fine chemical from a C. glutamicum strain incorporating such an altered protein. Those MCT proteins involved in the export of fine chemical molecules from the cell may be increased in number or activity such that greater quantities of these compounds are secreted to the extracellular medium, from which they are more readily recovered. Similarly, those MCT proteins involved in the import of nutrients necessary for the biosynthesis of one or more fine chemicals (e.g., phosphate, sulfate, nitrogen compounds, etc.) may be increased in number or activity such that these precursors, cofactors, or intermediate compounds are increased in concentration within the cell. Further, fatty acids and lipids themselves are desirable fine chemicals; by optimizing the activity or increasing the number of one or more MCT proteins of the invention which participate in the biosynthesis of these compounds, or by impairing the activity of one or more MCT proteins which are involved in the degradation of these compounds, it may be possible to increase the yield, production, and/or efficiency of production of fatty acid and lipid molecules from C. glutamicum.

[0009] The mutagenesis of one or more MCT genes of the invention may also result in MCT proteins having altered activities which indirectly impact the production of one or more desired fine chemicals from C. glutamicum. For example, MCT proteins of the invention involved in the export of waste products may be increased in number or activity such that the normal metabolic wastes of the cell (possibly increased in quantity due to the overproduction of the desired fine chemical) are efficiently exported before they are able to damage nucleotides and proteins within the cell (which would decrease the viability of the cell) or to interfere with fine chemical biosynthetic pathways (which would decrease the yield, production, or efficiency of production of the desired fine chemical). Further, the relatively large intracellular quantities of the desired fine chemical may in itself be toxic to the cell, so by increasing the activity or number of transporters able to export this compound from the cell, one may increase the viability of the cell in culture, in turn leading to a greater number of cells in the culture producing the desired fine chemical. The MCT proteins of the invention may also be manipulated such that the relative amounts of different lipid and fatty acid molecules are produced. This may have a profound effect on the lipid composition of the membrane of the cell. Since each type of lipid has different physical properties, an alteration in the lipid composition of a membrane may significantly alter membrane fluidity. Changes in membrane fluidity can impact the transport of molecules across the membrane, as well as the integrity of the cell, both of which have a profound effect on the production of fine chemicals from C. glutamicum in large-scale fermentative culture.

[0010] The invention provides novel nucleic acid molecules which encode proteins, referred to herein as MCT proteins, which are capable of, for example, participating in the metabolism of compounds necessary for the construction of cellular membranes in C. glutamicum, or in the transport of molecules across these membranes. Nucleic acid molecules encoding an MCT protein are referred to herein as MCT nucleic acid molecules. In a preferred embodiment, the MCT protein participates in the metabolism of compounds necessary for the construction of cellular membranes in C. glutamicum, or in the transport of molecules across these membranes. Examples of such proteins include those encoded by the genes set forth in Table 1.

[0011] Accordingly, one aspect of the invention pertains to isolated nucleic acid molecules (e.g., cDNAs, DNAs, or RNAs) comprising a nucleotide sequence encoding an MCT protein or biologically active portions thereof, as well as nucleic acid fragments suitable as primers or hybridization probes for the detection or amplification of MCT-encoding nucleic acid (e.g., DNA or mRNA). In particularly preferred embodiments, the isolated nucleic acid molecule comprises one of the nucleotide sequences set forth in Appendix A or the coding region or a complement thereof of one of these nucleotide sequences. In other particularly preferred embodiments, the isolated nucleic acid molecule of the invention comprises a nucleotide sequence which hybridizes to or is at least about 50%, preferably at least about 60%, more preferably at least about 70%, 80% or 90%, and even more preferably at least about 95%, 96%, 97%, 98%, 99% or more homologous to a nucleotide sequence set forth in Appendix A, or a portion thereof. In other preferred embodiments, the isolated nucleic acid molecule encodes one of the amino acid sequences set forth in Appendix B. The preferred MCT proteins of the present invention also preferably possess at least one of the MCT activities described herein.

[0012] In another embodiment, the isolated nucleic acid molecule encodes a protein or portion thereof wherein the protein or portion thereof includes an amino acid sequence which is sufficiently homologous to an amino acid sequence of Appendix B, e.g., sufficiently homologous to an amino acid sequence of Appendix B such that the protein or portion thereof maintains an MCT activity. Preferably, the protein or portion thereof encoded by the nucleic acid molecule maintains the ability to participate in the metabolism of compounds necessary for the construction of cellular membranes in C. glutamicum, or in the transport of molecules across these membranes. In one embodiment, the protein encoded by the nucleic acid molecule is at least about 50%, preferably at least about 60%, and more preferably at least about 70%, 80%, or 90% and most preferably at least about 95%, 96%, 97%, 98%, or 99% or more homologous to an amino acid sequence of Appendix B (e.g., an entire amino acid sequence selected from those sequences set forth in Appendix B). In another preferred embodiment, the protein is a full length C. glutamicum protein which is substantially homologous to an entire amino acid sequence of Appendix B (encoded by an open reading frame shown in Appendix A).

[0013] In another preferred embodiment, the isolated nucleic acid molecule is derived from C. glutamicum and encodes a protein (e.g., an MCT fusion protein) which includes a biologically active domain which is at least about 50% or more homologous to one of the amino acid sequences of Appendix B and is able to participate in the metabolism of compounds necessary for the construction of cellular membranes in C. glutamicum, or in the transport of molecules across these membranes, or has one or more of the activities set forth in Table 1, and which also includes heterologous nucleic acid sequences encoding a heterologous polypeptide or regulatory regions.

[0014] In another embodiment, the isolated nucleic acid molecule is at least 15 nucleotides in length and hybridizes under stringent conditions to a nucleic acid molecule comprising a nucleotide sequence of Appendix A. Preferably, the isolated nucleic acid molecule corresponds to a naturally-occurring nucleic acid molecule. More preferably, the isolated nucleic acid encodes a naturally-occurring C. glutamicum MCT protein, or a biologically active portion thereof.

[0015] Another aspect of the invention pertains to vectors, e.g., recombinant expression vectors, containing the nucleic acid molecules of the invention, and host cells into which such vectors have been introduced. In one embodiment, such a host cell is used to produce an MCT protein by culturing the host cell in a suitable medium. The MCT protein can be then isolated from the medium or the host cell.

[0016] Yet another aspect of the invention pertains to a genetically altered microorganism in which an MCT gene has been introduced or altered. In one embodiment, the genome of the microorganism has been altered by introduction of a nucleic acid molecule of the invention encoding wild-type or mutated MCT sequence as a transgene. In another embodiment, an endogenous MCT gene within the genome of the microorganism has been altered, e.g., functionally disrupted, by homologous recombination with an altered MCT gene. In another embodiment, an endogenous or introduced MCT gene in a microorganism has been altered by one or more point mutations, deletions, or inversions, but still encodes a functional MCT protein. In still another embodiment, one or more of the regulatory regions (e.g., a promoter, repressor, or inducer) of an MCT gene in a microorganism has been altered (e.g., by deletion, truncation, inversion, or point mutation) such that the expression of the MCT gene is modulated. In a preferred embodiment, the microorganism belongs to the genus Corynebacterium or Brevibacterium, with Corynebacterium glutamicum being particularly preferred. In a preferred embodiment, the microorganism is also utilized for the production of a desired compound, such as an amino acid, with lysine being particularly preferred.

[0017] In another aspect, the invention provides a method of identifying the presence or activity of Cornyebacterium diphtheriae in a subject. This method includes detection of one or more of the nucleic acid or amino acid sequences of the invention (e.g., the sequences set forth in Appendix A or Appendix B) in a subject, thereby detecting the presence or activity of Corynebacterium diphtheriae in the subject.

[0018] Still another aspect of the invention pertains to an isolated MCT protein or a portion, e.g., a biologically active portion, thereof. In a preferred embodiment, the isolated MCT protein or portion thereof can participate in the metabolism of compounds necessary for the construction of cellular membranes in C. glutamicum, or in the transport of molecules across these membranes. In another preferred embodiment, the isolated MCT protein or portion thereof is sufficiently homologous to an amino acid sequence of Appendix B such that the protein or portion thereof maintains the ability to participate in the metabolism of compounds necessary for the construction of cellular membranes in C. glutamicum, or in the transport of molecules across these membranes.

[0019] The invention also provides an isolated preparation of an MCT protein. In preferred embodiments, the MCT protein comprises an amino acid sequence of Appendix B. In another preferred embodiment, the invention pertains to an isolated full length protein which is substantially homologous to an entire amino acid sequence of Appendix B (encoded by an open reading frame set forth in Appendix A). In yet another embodiment, the protein is at least about 50%, preferably at least about 60%, and more preferably at least about 70%, 80%, or 90%, and most preferably at least about 95%, 96%, 97%, 98%, or 99% or more homologous to an entire amino acid sequence of Appendix B. In other embodiments, the isolated MCT protein comprises an amino acid sequence which is at least about 50% or more homologous to one of the amino acid sequences of Appendix B and is able to participate in the metabolism of compounds necessary for the construction of cellular membranes in C. glutamicum, or in the transport of molecules across these membranes, or has one or more of the activities set forth in Table 1.

[0020] Alternatively, the isolated MCT protein can comprise an amino acid sequence which is encoded by a nucleotide sequence which hybridizes, e.g., hybridizes under stringent conditions, or is at least about 50%, preferably at least about 60%, more preferably at least about 70%, 80%, or 90%, and even more preferably at least about 95%, 96%, 97%, 98,%, or 99% or more homologous, to a nucleotide sequence of Appendix B. It is also preferred that the preferred forms of MCT proteins also have one or more of the MCT bioactivities described herein.

[0021] The MCT polypeptide, or a biologically active portion thereof, can be operatively linked to a non-MCT polypeptide to form a fusion protein. In preferred embodiments, this fusion protein has an activity which differs from that of the MCT protein alone. In other preferred embodiments, this fusion protein participate in the metabolism of compounds necessary for the construction of cellular membranes in C. glutamicum, or in the transport of molecules across these membranes. In particularly preferred embodiments, integration of this fusion protein into a host cell modulates production of a desired compound from the cell.

[0022] In another aspect, the invention provides methods for screening molecules which modulate the activity of an MCT protein, either by interacting with the protein itself or a substrate or binding partner of the MCT protein, or by modulating the transcription or translation of an MCT nucleic acid molecule of the invention.

[0023] Another aspect of the invention pertains to a method for producing a fine chemical. This method involves the culturing of a cell containing a vector directing the expression of an MCT nucleic acid molecule of the invention, such that a fine chemical is produced. In a preferred embodiment, this method further includes the step of obtaining a cell containing such a vector, in which a cell is transfected with a vector directing the expression of an MCT nucleic acid. In another preferred embodiment, this method further includes the step of recovering the fine chemical from the culture. In a particularly preferred embodiment, the cell is from the genus Corynebacterium or Brevibacterium, or is selected from those strains set forth in Table 3.

[0024] Another aspect of the invention pertains to methods for modulating production of a molecule from a microorganism. Such methods include contacting the cell with an agent which modulates MCT protein activity or MCT nucleic acid expression such that a cell associated activity is altered relative to this same activity in the absence of the agent. In a preferred embodiment, the cell is modulated for one or more C. glutamicum metabolic pathways for cell membrane components or is modulated for the transport of compounds across such membranes, such that the yields or rate of production of a desired fine chemical by this microorganism is improved. The agent which modulates MCT protein activity can be an agent which stimulates MCT protein activity or MCT nucleic acid expression. Examples of agents which stimulate MCT protein activity or MCT nucleic acid expression include small molecules, active MCT proteins, and nucleic acids encoding MCT proteins that have been introduced into the cell. Examples of agents which inhibit MCT activity or expression include small molecules and antisense MCT nucleic acid molecules.

[0025] Another aspect of the invention pertains to methods for modulating yields of a desired compound from a cell, involving the introduction of a wild-type or mutant MCT gene into a cell, either maintained on a separate plasmid or integrated into the genome of the host cell. If integrated into the genome, such integration can be random, or it can take place by homologous recombination such that the native gene is replaced by the introduced copy, causing the production of the desired compound from the cell to be modulated. In a preferred embodiment, said yields are increased. In another preferred embodiment, said chemical is a fine chemical. In a particularly preferred embodiment, said fine chemical is an amino acid. In especially preferred embodiments, said amino acid is L-lysine.

### DETAILED DESCRIPTION OF THE INVENTION

[0026] The present invention provides MCT nucleic acid and protein molecules which are involved in the metabolism of cellular membrane components in C. glutamicum or in the transport of compounds across such membranes. The molecules of the invention may be utilized in the modulation of production of fine chemicals from microorganisms, such as C. glutamicum, either directly (e.g., where overexpression or optimization of a fatty acid biosynthesis protein has a direct impact on the yield, production, and/or efficiency of production of the fatty acid from modified C. glutamicum), or may have an indirect impact which nonetheless results in an increase of yield, production, and/or efficiency of production of the desired compound (e.g., where modulation of the metabolism of cell membrane components results in alterations in the yield, production, and/or efficiency of production or the composition of the cell membrane, which in turn may impact the production of one or more fine chemicals). Aspects of the invention are further explicated below.

I. Fine Chemicals

[0027] The term ‘fine chemical’ is art-recognized and includes molecules produced by an organism which have applications in various industries, such as, but not limited to, the pharmaceutical, agriculture, and cosmetics industries. Such compounds include organic acids, such as tartaric acid, itaconic acid, and diaminopimelic acid, both proteinogenic and non-proteinogenic amino acids, purine and pyrimidine bases, nucleosides, and nucleotides (as described e.g. in Kuninaka, A. (1996) Nucleotides and related compounds, p. 561-612, in Biotechnology vol. 6, Rehm et al., eds. VCH: Weinheim, and references contained therein), lipids, both saturated and unsaturated fatty acids (e.g., arachidonic acid), diols (e.g., propane diol, and butane diol), carbohydrates (e.g., hyaluronic acid and trehalose), aromatic compounds (e.g., aromatic amines, vanillin, and indigo), vitamins and cofactors (as described in Ullmann's Encyclopedia of Industrial Chemistry, vol. A27, “Vitamins”, p. 443-613 (1996) VCH: Weinheim and references therein; and Ong, A. S., Niki, E. & Packer, L. (1995) “Nutrition, Lipids, Health, and Disease” Proceedings of the UNESCO/Confederation of Scientific and Technological Associations in Malaysia, and the Society for Free Radical Research—Asia, held Sep. 1-3, 1994 at Penang, Malaysia, AOCS Press, (1995)), enzymes, polyketides (Cane et al. (1998) Science 282: 63-68), and all other chemicals described in Gutcho (1983) Chemicals by Fermentation, Noyes Data Corporation, ISBN: 0818805086 and references therein. The metabolism and uses of certain of these fine chemicals are further explicated below.

A. Amino Acid Metabolism and Uses

[0028] Amino acids comprise the basic structural units of all proteins, and as such are essential for normal cellular functioning in all organisms. The term “amino acid” is art-recognized. The proteinogenic amino acids, of which there are 20 species, serve as structural units for proteins, in which they are linked by peptide bonds, while the nonproteinogenic amino acids (hundreds of which are known) are not normally found in proteins (see Ulmann's Encyclopedia of Industrial Chemistry, vol. A2, p. 57-97 VCH: Weinheim (1985)). Amino acids may be in the D- or L-optical configuration, though L-amino acids are generally the only type found in naturally-occurring proteins. Biosynthetic and degradative pathways of each of the 20 proteinogenic amino acids have been well characterized in both prokaryotic and eukaryotic cells (see, for example, Stryer, L. Biochemistry, 3^{rd} edition, pages 578-590 (1988)). The ‘essential’ amino acids (histidine, isoleucine, leucine, lysine, methionine, phenylalanine, threonine, tryptophan, and valine), so named because they are generally a nutritional requirement due to the complexity of their biosyntheses, are readily converted by simple biosynthetic pathways to the remaining 11 ‘nonessential’ amino acids (alanine, arginine, asparagine, aspartate, cysteine, glutamate, glutamine, glycine, proline, serine, and tyrosine). Higher animals do retain the ability to synthesize some of these amino acids, but the essential amino acids must be supplied from the diet in order for normal protein synthesis to occur.

[0029] Aside from their function in protein biosynthesis, these amino acids are interesting chemicals in their own right, and many have been found to have various applications in the food, feed, chemical, cosmetics, agriculture, and pharmaceutical industries. Lysine is an important amino acid in the nutrition not only of humans, but also of monogastric animals such as poultry and swine. Glutamate is most commonly used as a flavor additive (mono-sodium glutamate, MSG) and is widely used throughout the food industry, as are aspartate, phenylalanine, glycine, and cysteine. Glycine, L-methionine and tryptophan are all utilized in the pharmaceutical industry. Glutamine, valine, leucine, isoleucine, histidine, arginine, pro line, serine and alanine are of use in both the pharmaceutical and cosmetics industries. Threonine, tryptophan, and D/L-methionine are common feed additives. (Leuchtenberger, W. (1996) Amino aids-technical production and use, p. 466-502 in Rehm et al. (eds.) Biotechnology vol. 6, chapter 14a, VCH: Weinheim). Additionally, these amino acids have been found to be useful as precursors for the synthesis of synthetic amino acids and proteins, such as N-acetylcysteine, S-carboxymethyl-L-cysteine, (S)-5-hydroxytryptophan, and others described in Ulmann's Encyclopedia of Industrial Chemistry, vol. A2, p. 57-97, VCH: Weinheim, 1985.

[0030] The biosynthesis of these natural amino acids in organisms capable of producing them, such as bacteria, has been well characterized (for review of bacterial amino acid biosynthesis and regulation thereof, see Umbarger, H. E. (1978) Ann. Rev. Biochem. 47: 533-606). Glutamate is synthesized by the reductive amination of α-ketoglutarate, an intermediate in the citric acid cycle. Glutamine, proline, and arginine are each subsequently produced from glutamate. The biosynthesis of serine is a three-step process beginning with 3-phosphoglycerate (an intermediate in glycolysis), and resulting in this amino acid after oxidation, transamination, and hydrolysis steps. Both cysteine and glycine are produced from serine; the former by the condensation of homocysteine with serine, and the latter by the transferal of the side-chain β-carbon atom to tetrahydrofolate, in a reaction catalyzed by serine transhydroxymethylase. Phenylalanine, and tyrosine are synthesized from the glycolytic and pentose phosphate pathway precursors erythrose 4-phosphate and phosphoenolpyruvate in a 9-step biosynthetic pathway that differ only at the final two steps after synthesis of prephenate. Tryptophan is also produced from these two initial molecules, but its synthesis is an 11-step pathway. Tyrosine may also be synthesized from phenylalanine, in a reaction catalyzed by phenylalanine hydroxylase. Alanine, valine, and leucine are all biosynthetic products of pyruvate, the final product of glycolysis. Aspartate is formed from oxaloacetate, an intermediate of the citric acid cycle. Asparagine, methionine, threonine, and lysine are each produced by the conversion of aspartate. Isoleucine is formed from threonine. A complex 9-step pathway results in the production of histidine from 5-phosphoribosyl-1-pyrophosphate, an activated sugar.

[0031] Amino acids in excess of the protein synthesis needs of the cell cannot be stored, and are instead degraded to provide intermediates for the major metabolic pathways of the cell (for review see Stryer, L. Biochemistry 3^{rd} ed. Ch. 21 “Amino Acid Degradation and the Urea Cycle” p. 495-516 (1988)). Although the cell is able to convert unwanted amino acids into useful metabolic intermediates, amino acid production is costly in terms of energy, precursor molecules, and the enzymes necessary to synthesize them. Thus it is not surprising that amino acid biosynthesis is regulated by feedback inhibition, in which the presence of a particular amino acid serves to slow or entirely stop its own production (for overview of feedback mechanisms in amino acid biosynthetic pathways, see Stryer, L. Biochemistry, 3^{rd} ed. Ch. 24: “Biosynthesis of Amino Acids and Heme” p. 575-600 (1988)). Thus, the output of any particular amino acid is limited by the amount of that amino acid present in the cell.

B. Vitamin, Cofactor, and Nutraceutical Metabolism and Uses

[0032] Vitamins, cofactors, and nutraceuticals comprise another group of molecules which the higher animals have lost the ability to synthesize and so must ingest, although they are readily synthesized by other organisms such as bacteria. These molecules are either bioactive substances themselves, or are precursors of biologically active substances which may serve as electron carriers or intermediates in a variety of metabolic pathways. Aside from their nutritive value, these compounds also have significant industrial value as coloring agents, antioxidants, and catalysts or other processing aids. (For an overview of the structure, activity, and industrial applications of these compounds, see, for example, Ullman's Encyclopedia of Industrial Chemistry, “Vitamins” vol. A27, p. 443-613, VCH: Weinheim, 1996.) The term “vitamin” is art-recognized, and includes nutrients which are required by an organism for normal functioning, but which that organism cannot synthesize by itself. The group of vitamins may encompass cofactors and nutraceutical compounds. The language “cofactor” includes nonproteinaceous compounds required for a normal enzymatic activity to occur. Such compounds may be organic or inorganic; the cofactor molecules of the invention are preferably organic. The term “nutraceutical” includes dietary supplements having health benefits in plants and animals, particularly humans. Examples of such molecules are vitamins, antioxidants, and also certain lipids (e.g., polyunsaturated fatty acids).

[0033] The biosynthesis of these molecules in organisms capable of producing them, such as bacteria, has been largely characterized (Ullman's Encyclopedia of Industrial Chemistry, “Vitamins” vol. A27, p. 443-613, VCH: Weinheim, 1996; Michal, G. (1999) Biochemical Pathways: An Atlas of Biochemistry and Molecular Biology, John Wiley & Sons; Ong, A. S., Niki, E. & Packer, L. (1995) “Nutrition, Lipids, Health, and Disease” Proceedings of the UNESCO/Confederation of Scientific and Technological Associations in Malaysia, and the Society for Free Radical Research—Asia, held Sep. 1-3, 1994 at Penang, Malaysia, AOCS Press: Champaign, Ill. X, 374 S).

[0034] Thiamin (vitamin B₁) is produced by the chemical coupling of pyrimidine and thiazole moieties. Riboflavin (vitamin B₂) is synthesized from guanosine-5′-triphosphate (GTP) and ribose-5′-phosphate. Riboflavin, in turn, is utilized for the synthesis of flavin mononucleotide (FMN) and flavin adenine dinucleotide (FAD). The family of compounds collectively termed ‘vitamin B₆’ (e.g., pyridoxine, pyridoxamine, pyridoxa-5′-phosphate, and the commercially used pyridoxin hydrochloride) are all derivatives of the common structural unit, 5-hydroxy-6-methylpyridine. Pantothenate (pantothenic acid, (R)-(+)-N-(2,4-dihydroxy-3,3-dimethyl-1-oxobutyl)-β-alanine) can be produced either by chemical synthesis or by fermentation. The final steps in pantothenate biosynthesis consist of the ATP-driven condensation of β-alanine and pantoic acid. The enzymes responsible for the biosynthesis steps for the conversion to pantoic acid, to β-alanine and for the condensation to panthotenic acid are known. The metabolically active form of pantothenate is Coenzyme A, for which the biosynthesis proceeds in 5 enzymatic steps. Pantothenate, pyridoxal-5′-phosphate, cysteine and ATP are the precursors of Coenzyme A. These enzymes not only catalyze the formation of panthothante, but also the production of (R)-pantoic acid, (R)-pantolacton, (R)-panthenol (provitamin B₅), pantetheine (and its derivatives) and coenzyme A.

[0035] Biotin biosynthesis from the precursor molecule pimeloyl-CoA in microorganisms has been studied in detail and several of the genes involved have been identified. Many of the corresponding proteins have been found to also be involved in Fe-cluster synthesis and are members of the nifS class of proteins. Lipoic acid is derived from octanoic acid, and serves as a coenzyme in energy metabolism, where it becomes part of the pyruvate dehydrogenase complex and the α-ketoglutarate dehydrogenase complex. The folates are a group of substances which are all derivatives of folic acid, which is turn is derived from L-glutamic acid, p-amino-benzoic acid and 6-methylpterin. The biosynthesis of folic acid and its derivatives, starting from the metabolism intermediates guanosine-5′-triphosphate (GTP), L-glutamic acid and p-amino-benzoic acid has been studied in detail in certain microorganisms.

[0036] Corrinoids (such as the cobalamines and particularly vitamin B₁₂) and porphyrines belong to a group of chemicals characterized by a tetrapyrole ring system. The biosynthesis of vitamin B₁₂ is sufficiently complex that it has not yet been completely characterized, but many of the enzymes and substrates involved are now known. Nicotinic acid (nicotinate), and nicotinamide are pyridine derivatives which are also termed ‘niacin’. Niacin is the precursor of the important coenzymes NAD (nicotinamide adenine dinucleotide) and NADP (nicotinamide adenine dinucleotide phosphate) and their reduced forms.

[0037] The large-scale production of these compounds has largely relied on cell-free chemical syntheses, though some of these chemicals have also been produced by large-scale culture of microorganisms, such as riboflavin, Vitamin B₆, pantothenate, and biotin. Only Vitamin B₁₂ is produced solely by fermentation, due to the complexity of its synthesis. In vitro methodologies require significant inputs of materials and time, often at great cost.

C. Purine, Pyrimidine, Nucleoside and Nucleotide Metabolism and Uses

[0038] Purine and pyrimidine metabolism genes and their corresponding proteins are important targets for the therapy of tumor diseases and viral infections. The language “purine” or “pyrimidine” includes the nitrogenous bases which are constituents of nucleic acids, co-enzymes, and nucleotides. The term “nucleotide” includes the basic structural units of nucleic acid molecules, which are comprised of a nitrogenous base, a pentose sugar (in the case of RNA, the sugar is ribose; in the case of DNA, the sugar is D-deoxyribose), and phosphoric acid. The language “nucleoside” includes molecules which serve as precursors to nucleotides, but which are lacking the phosphoric acid moiety that nucleotides possess. By inhibiting the biosynthesis of these molecules, or their mobilization to form nucleic acid molecules, it is possible to inhibit RNA and DNA synthesis; by inhibiting this activity in a fashion targeted to cancerous cells, the ability of tumor cells to divide and replicate may be inhibited. Additionally, there are nucleotides which do not form nucleic acid molecules, but rather serve as energy stores (i.e., AMP) or as coenzymes (i.e., FAD and NAD).

[0039] Several publications have described the use of these chemicals for these medical indications, by influencing purine and/or pyrimidine metabolism (e.g. Christopherson, R. I., and Lyons, S. D. (1990) “Potent inhibitors of de novo pyrimidine and purine biosynthesis as chemotherapeutic agents.” Med. Res. Reviews 10: 505-548). Studies of enzymes involved in purine and pyrimidine metabolism have been focused on the development of new drugs which can be used, for example, as immunosuppressants or anti-proliferants (Smith, J. L., (1995) “Enzymes in nucleotide synthesis.” Curr. Opin. Struct. Biol. 5: 752-757; (1995) Biochem Soc. Transact. 23: 877-902). However, purine and pyrimidine bases, nucleosides and nucleotides have other utilities: as intermediates in the biosynthesis of several fine chemicals (e.g., thiamine, S-adenosyl-methionine, folates, or riboflavin), as energy carriers for the cell (e.g., ATP or GTP), and for chemicals themselves, commonly used as flavor enhancers (e.g., IMP or GMP) or for several medicinal applications (see, for example, Kuninaka, A. (1996) Nucleotides and Related Compounds in Biotechnology vol. 6, Rehm et al., eds. VCH: Weinheim, p. 561-612). Also, enzymes involved in purine, pyrimidine, nucleoside, or nucleotide metabolism are increasingly serving as targets against which chemicals for crop protection, including fungicides, herbicides and insecticides, are developed.

[0040] The metabolism of these compounds in bacteria has been characterized (for reviews see, for example, Zalkin, H. and Dixon, J. E. (1992) “de novo purine nucleotide biosynthesis”, in: Progress in Nucleic Acid Research and Molecular Biology, vol. 42, Academic Press: p. 259-287; and Michal, G. (1999) “Nucleotides and Nucleosides”, Chapter 8 in: Biochemical Pathways: An Atlas of Biochemistry and Molecular Biology, Wiley: New York). Purine metabolism has been the subject of intensive research, and is essential to the normal functioning of the cell. Impaired purine metabolism in higher animals can cause severe disease, such as gout. Purine nucleotides are synthesized from ribose-5-phosphate, in a series of steps through the intermediate compound inosine-5′-phosphate (IMP), resulting in the production of guanosine-5′-monophosphate (GMP) or adenosine-5′-monophosphate (AMP), from which the triphosphate forms utilized as nucleotides are readily formed. These compounds are also utilized as energy stores, so their degradation provides energy for many different biochemical processes in the cell. Pyrimidine biosynthesis proceeds by the formation of uridine-5′-monophosphate (UMP) from ribose-5-phosphate. UMP, in turn, is converted to cytidine-5′-triphosphate (CTP). The deoxy-forms of all of these nucleotides are produced in a one step reduction reaction from the diphosphate ribose form of the nucleotide to the diphosphate deoxyribose form of the nucleotide. Upon phosphorylation, these molecules are able to participate in DNA synthesis.

D. Trehalose Metabolism and Uses

[0041] Trehalose consists of two glucose molecules, bound in α, α-1,1 linkage. It is commonly used in the food industry as a sweetener, an additive for dried or frozen foods, and in beverages. However, it also has applications in the pharmaceutical, cosmetics and biotechnology industries (see, for example, Nishimoto et al., (1998) U.S. Pat. No. 5,759,610; Singer, M. A. and Lindquist, S. (1998) Trends Biotech. 16: 460-467; Paiva, C. L. A. and Panek, A. D. (1996) Biotech. Ann. Rev. 2: 293-314; and Shiosaka, M. (1997) J. Japan 172: 97-102). Trehalose is produced by enzymes from many microorganisms and is naturally released into the surrounding medium, from which it can be collected using methods known in the art.

II. Membrane Biosynthesis and Transmembrane Transport

[0042] Cellular membranes serve a variety of functions in a cell. First and foremost, a membrane differentiates the contents of a cell from the surrounding environment, thus giving integrity to the cell. Membranes may also serve as barriers to the influx of hazardous or unwanted compounds, and also to the efflux of desired compounds. Cellular membranes are by nature impervious to the unfacilitated diffusion of hydrophilic compounds such as proteins, water molecules and ions due to their structure: a bilayer of lipid molecules in which the polar head groups face outwards (towards the exterior and interior of the cell, respectively) and the nonpolar tails face inwards at the center of the bilayer, forming a hydrophobic core (for a general review of membrane structure and function, see Gennis, R. B. (1989) Biomembranes, Molecular Structure and Function, Springer: Heidelberg). This barrier enables cells to maintain a relatively higher concentration of desired compounds and a relatively lower concentration of undesired compounds than are contained within the surrounding medium, since the diffusion of these compounds is effectively blocked by the membrane. However, the membrane also presents an effective barrier to the import of desired compounds and the export of waste molecules. To overcome this difficulty, cellular membranes incorporate many kinds of transporter proteins which are able to facilitate the transmembrane transport of different kinds of compounds. There are two general classes of these transport proteins: pores or channels and transporters. The former are integral membrane proteins, sometimes complexes of proteins, which form a regulated hole through the membrane. This regulation, or ‘gating’ is generally specific to the molecules to be transported by the pore or channel, rendering these transmembrane constructs selectively permeable to a specific class of substrates; for example, a potassium channel is constructed such that only ions having a like charge and size to that of potassium may pass through. Channel and pore proteins tend to have discrete hydrophobic and hydrophilic domains, such that the hydrophobic face of the protein may associate with the interior of the membrane while the hydrophilic face lines the interior of the channel, thus providing a sheltered hydrophilic environment through which the selected hydrophilic molecule may pass. Many such pores/channels are known in the art, including those for potassium, calcium, sodium, and chloride ions.

[0043] This pore and channel-mediated system of facilitated diffusion is limited to very small molecules, such as ions, because pores or channels large enough to permit the passage of whole proteins by facilitated diffusion would be unable to prevent the passage of smaller hydrophilic molecules as well. Transport of molecules by this process is sometimes termed ‘facilitated diffusion’ since the driving force of a concentration gradient is required for the transport to occur. Permeases also permit facilitated diffusion of larger molecules, such as glucose or other sugars, into the cell when the concentration of these molecules on one side of the membrane is greater than that on the other (also called ‘uniport’). In contrast to pores or channels, these integral membrane proteins (often having between 6-14 membrane-spanning α-helices) do not form open channels through the membrane, but rather bind to the target molecule at the surface of the membrane and then undergo a conformational shift such that the target molecule is released on the opposite side of the membrane.

[0044] However, cells frequently require the import or export of molecules against the existing concentration gradient (‘active transport’), a situation in which facilitated diffusion cannot occur. There are two general mechanisms used by cells for such membrane transport: symport or antiport, and energy-coupled transport such as that mediated by the ABC transporters. Symport and antiport systems couple the movement of two different molecules across the membrane (via permeases having two separate binding sites for the two different molecules); in symport, both molecules are transported in the same direction, while in antiport, one molecule is imported while the other is exported. This is possible energetically because one of the two molecules moves in accordance with a concentration gradient, and this energetically favorable event is permitted only upon concomitant movement of a desired compound against the prevailing concentration gradient. Single molecules may be transported across the membrane against the concentration gradient in an energy-driven process, such as that utilized by the ABC transporters. In this system, the transport protein located in the membrane has an ATP-binding cassette; upon binding of the target molecule, the ATP is converted to ADP+Pi, and the resulting release of energy is used to drive the movement of the target molecule to the opposite face of the membrane, facilitated by the transporter. For more detailed descriptions of all of these transport systems, see: Bamberg, E. et al., (1993) “Charge transport of ion pumps on lipid bilayer membranes”, Q. Rev. Biophys. 26: 1-25; Findlay, J. B. C. (1991) “Structure and function in membrane transport systems”, Curr. Opin. Struct. Biol. 1: 804-810; Higgins, C. F. (1992) “ABC transporters from microorganisms to man”, Ann. Rev. Cell Biol. 8: 67-113; Gennis, R. B. (1989) “Pores, Channels and Transporters”, in: Biomembranes, Molecular Structure and Function, Springer: Heidelberg, p. 270-322; and Nikaido, H. and Saier, H. (1992) “Transport proteins in bacteria: common themes in their design”, Science 258: 936-942, and references contained within each of these references.

[0045] The synthesis of membranes is a well-characterized process involving a number of components, the most important of which are lipid molecules. Lipid synthesis may be divided into two parts: the synthesis of fatty acids and their attachment to sn-glycerol-3-phosphate, and the addition or modification of a polar head group. Typical lipids utilized in bacterial membranes include phospholipids, glycolipids, sphingolipids, and phosphoglycerides. Fatty acid synthesis begins with the conversion of acetyl CoA either to malonyl CoA by acetyl CoA carboxylase, or to acetyl-ACP by acetyltransacylase. Following a condensation reaction, these two product molecules together form acetoacetyl-ACP, which is converted by a series of condensation, reduction and dehydration reactions to yield a saturated fatty acid molecule having a desired chain length. The production of unsaturated fatty acids from such molecules is catalyzed by specific desaturases either aerobically, with the help of molecular oxygen, or anaerobically (for reference on fatty acid synthesis, see F. C. Neidhardt et al. (1996) E. coli and Salmonella. ASM Press: Washington, D.C., p. 612-636 and references contained therein; Lengeler et al. (eds) (1999) Biology of Procaryotes. Thieme: Stuttgart, N.Y., and references contained therein; and Magnuson, K. et al., (1993) Microbiological Reviews 57: 522-542, and references contained therein). The cyclopropane fatty acids (CFA) are synthesized by a specific CFA-synthase using SAM as a cosubstrate. Branched chain fatty acids are synthesized from branched chain amino acids that are deaminated to yield branched chain 2-oxo-acids (see Lengeler et al., eds. (1999) Biology of Procaryotes. Thieme: Stuttgart, N.Y., and references contained therein). Another essential step in lipid synthesis is the transfer of fatty acids onto the polar head groups by, for example, glycerol-phosphate-acyltransferases. The combination of various precursor molecules and biosynthetic enzymes results in the production of different fatty acid molecules, which has a profound effect on the composition of the membrane.

III. Elements and Methods of the Invention

[0046] The present invention is based, at least in part, on the discovery of novel molecules, referred to herein as MCT nucleic acid and protein molecules, which control the production of cellular membranes in C. glutamicum and govern the movement of molecules across such membranes. In one embodiment, the MCT molecules participate in the metabolism of compounds necessary for the construction of cellular membranes in C. glutamicum, or in the transport of molecules across these membranes. In a preferred embodiment, the activity of the MCT molecules of the present invention to regulate membrane component production and membrane transport has an impact on the production of a desired fine chemical by this organism. In a particularly preferred embodiment, the MCT molecules of the invention are modulated in activity, such that the C. glutamicum metabolic pathways which the MCT proteins of the invention regulate are modulated in yield, production, and/or efficiency of production and the transport of compounds through the membranes is altered in efficiency, which either directly or indirectly modulates the yield, production, and/or efficiency of production of a desired fine chemical by C. glutamicum.

[0047] The language, “MCT protein” or “MCT polypeptide” includes proteins which participate in the metabolism of compounds necessary for the construction of cellular membranes in C. glutamicum, or in the transport of molecules across these membranes. Examples of MCT proteins include those encoded by the MCT genes set forth in Table 1 and Appendix A. The terms “MCT gene” or “MCT nucleic acid sequence” include nucleic acid sequences encoding an MCT protein, which consist of a coding region and also corresponding untranslated 5′ and 3′ sequence regions. Examples of MCT genes include those set forth in Table 1. The terms “production” or “productivity” are art-recognized and include the concentration of the fermentation product (for example, the desired fine chemical) formed within a given time and a given fermentation volume (e.g., kg product per hour per liter). The term “efficiency of production” includes the time required for a particular level of production to be achieved (for example, how long it takes for the cell to attain a particular rate of output of a fine chemical). The term “yield” or “product/carbon yield” is art-recognized and includes the efficiency of the conversion of the carbon source into the product (i.e., fine chemical). This is generally written as, for example, kg product per kg carbon source. By increasing the yield or production of the compound, the quantity of recovered molecules, or of useful recovered molecules of that compound in a given amount of culture over a given amount of time is increased. The terms “biosynthesis” or a “biosynthetic pathway” are art-recognized and include the synthesis of a compound, preferably an organic compound, by a cell from intermediate compounds in what may be a multistep and highly regulated process. The terms “degradation” or a “degradation pathway” are art-recognized and include the breakdown of a compound, preferably an organic compound, by a cell to degradation products (generally speaking, smaller or less complex molecules) in what may be a multistep and highly regulated process. The language “metabolism” is art-recognized and includes the totality of the biochemical reactions that take place in an organism. The metabolism of a particular compound, then, (e.g., the metabolism of an amino acid such as glycine) comprises the overall biosynthetic, modification, and degradation pathways in the cell related to this compound.

[0048] In another embodiment, the MCT molecules of the invention are capable of modulating the production of a desired molecule, such as a fine chemical, in a microorganism such as C. glutamicum. There are a number of mechanisms by which the alteration of an MCT protein of the invention may directly affect the yield, production, and/or efficiency of production of a fine chemical from a C. glutamicum strain incorporating such an altered protein. Those MCT proteins involved in the export of fine chemical molecules from the cell may be increased in number or activity such that greater quantities of these compounds are secreted to the extracellular medium, from which they are more readily recovered. Similarly, those MCT proteins involved in the import of nutrients necessary for the biosynthesis of one or more fine chemicals (e.g., phosphate, sulfate, nitrogen compounds, etc.) may be increased in number or activity such that these precursor, cofactor, or intermediate compounds are increased in concentration within the cell. Further, fatty acids and lipids themselves are desirable fine chemicals; by optimizing the activity or increasing the number of one or more MCT proteins of the invention which participate in the biosynthesis of these compounds, or by impairing the activity of one or more MCT proteins which are involved in the degradation of these compounds, it may be possible to increase the yield, production, and/or efficiency of production of fatty acid and lipid molecules from C. glutamicum.

[0049] The mutagenesis of one or more MCT genes of the invention may also result in MCT proteins having altered activities which indirectly impact the production of one or more desired fine chemicals from C. glutamicum. For example, MCT proteins of the invention involved in the export of waste products may be increased in number or activity such that the normal metabolic wastes of the cell (possibly increased in quantity due to the overproduction of the desired fine chemical) are efficiently exported before they are able to damage nucleotides and proteins within the cell (which would decrease the viability of the cell) or to interfere with fine chemical biosynthetic pathways (which would decrease the yield, production, or efficiency of production of the desired fine chemical). Further, the relatively large intracellular quantities of the desired fine chemical may in itself be toxic to the cell, so by increasing the activity or number of transporters able to export this compound from the cell, one may increase the viability of the cell in culture, in turn leading to a greater number of cells in the culture producing the desired fine chemical. The MCT proteins of the invention may also be manipulated such that the relative amounts of different lipid and fatty acid molecules are produced. This may have a profound effect on the lipid composition of the membrane of the cell. Since each type of lipid has different physical properties, an alteration in the lipid composition of a membrane may significantly alter membrane fluidity. Changes in membrane fluidity can impact the transport of molecules across the membrane, as well as the integrity of the cell, both of which have a profound effect on the production of fine chemicals from C. glutamicum in large-scale fermentative culture.

[0050] The isolated nucleic acid sequences of the invention are contained within the genome of a Corynebacterium glutamicum strain available through the American Type Culture Collection, given designation ATCC 13032. The nucleotide sequence of the isolated C. glutamicum MCT DNAs and the predicted amino acid sequences of the C. glutamicum MCT proteins are shown in Appendices A and B, respectively. Computational analyses were performed which classified and/or identified these nucleotide sequences as sequences which encode proteins involved in the metabolism of cellular membrane components or proteins involved in the transport of compounds across such membranes.

[0051] The present invention also pertains to proteins which have an amino acid sequence which is substantially homologous to an amino acid sequence of Appendix B. As used herein, a protein which has an amino acid sequence which is substantially homologous to a selected amino acid sequence is least about 50% homologous to the selected amino acid sequence, e.g., the entire selected amino acid sequence. A protein which has an amino acid sequence which is substantially homologous to a selected amino acid sequence can also be least about 50-60%, preferably at least about 60-70%, and more preferably at least about 70-80%, 80-90%, or 90-95%, and most preferably at least about 96%, 97%, 98%, 99% or more homologous to the selected amino acid sequence.

[0052] The MCT protein or a biologically active portion or fragment thereof of the invention can participate in the metabolism of compounds necessary for the construction of cellular membranes in C. glutamicum, or in the transport of molecules across these membranes, or have one or more of the activities set forth in Table 1.

[0053] Various aspects of the invention are described in further detail in the following subsections:

A. Isolated Nucleic Acid Molecules

[0054] One aspect of the invention pertains to isolated nucleic acid molecules that encode MCT polypeptides or biologically active portions thereof, as well as nucleic acid fragments sufficient for use as hybridization probes or primers for the identification or amplification of MCT-encoding nucleic acid (e.g., MCT DNA). As used herein, the term “nucleic acid molecule” is intended to include DNA molecules (e.g., cDNA or genomic DNA) and RNA molecules (e.g., mRNA) and analogs of the DNA or RNA generated using nucleotide analogs. This term also encompasses untranslated sequence located at both the 3′ and 5′ ends of the coding region of the gene: at least about 100 nucleotides of sequence upstream from the 5′ end of the coding region and at least about 20 nucleotides of sequence downstream from the 3′end of the coding region of the gene. The nucleic acid molecule can be single-stranded or double-stranded, but preferably is double-stranded DNA. An “isolated” nucleic acid molecule is one which is separated from other nucleic acid molecules which are present in the natural source of the nucleic acid. Preferably, an “isolated” nucleic acid is free of sequences which naturally flank the nucleic acid (i.e., sequences located at the 5′ and 3′ ends of the nucleic acid) in the genomic DNA of the organism from which the nucleic acid is derived. For example, in various embodiments, the isolated MCT nucleic acid molecule can contain less than about 5 kb, 4 kb, 3 kb, 2 kb, 1 kb, 0.5 kb or 0.1 kb of nucleotide sequences which naturally flank the nucleic acid molecule in genomic DNA of the cell from which the nucleic acid is derived (e.g, a C. glutamicum cell). Moreover, an “isolated” nucleic acid molecule, such as a DNA molecule, can be substantially free of other cellular material, or culture medium when produced by recombinant techniques, or chemical precursors or other chemicals when chemically synthesized.

[0055] A nucleic acid molecule of the present invention, e.g., a nucleic acid molecule having a nucleotide sequence of Appendix A, or a portion thereof, can be isolated using standard molecular biology techniques and the sequence information provided herein. For example, a C. glutamicum MCT DNA can be isolated from a C. glutamicum library using all or portion of one of the sequences of Appendix A as a hybridization probe and standard hybridization techniques (e.g., as described in Sambrook, J., Fritsh, E. F., and Maniatis, T. Molecular Cloning: A Laboratory Manual. 2nd, ed., Cold Spring Harbor Laboratory, Cold Spring Harbor Laboratory Press, Cold Spring Harbor, N.Y., 1989). Moreover, a nucleic acid molecule encompassing all or a portion of one of the sequences of Appendix A can be isolated by the polymerase chain reaction using oligonucleotide primers designed based upon this sequence (e.g., a nucleic acid molecule encompassing all or a portion of one of the sequences of Appendix A can be isolated by the polymerase chain reaction using oligonucleotide primers designed based upon this same sequence of Appendix A). For example, mRNA can be isolated from normal endothelial cells (e.g., by the guanidinium-thiocyanate extraction procedure of Chirgwin et al. (1979) Biochemistry 18: 5294-5299) and DNA can be prepared using reverse transcriptase (e.g., Moloney MLV reverse transcriptase, available from Gibco/BRL, Bethesda, Md.; or AMV reverse transcriptase, available from Seikagaku America, Inc., St. Petersburg, Fla.). Synthetic oligonucleotide primers for polymerase chain reaction amplification can be designed based upon one of the nucleotide sequences shown in Appendix A. A nucleic acid of the invention can be amplified using cDNA or, alternatively, genomic DNA, as a template and appropriate oligonucleotide primers according to standard PCR amplification techniques. The nucleic acid so amplified can be cloned into an appropriate vector and characterized by DNA sequence analysis. Furthermore, oligonucleotides corresponding to an MCT nucleotide sequence can be prepared by standard synthetic techniques, e.g., using an automated DNA synthesizer.

[0056] In a preferred embodiment, an isolated nucleic acid molecule of the invention comprises one of the nucleotide sequences shown in Appendix A. The sequences of Appendix A correspond to the Corynebacterium glutamicum MCT DNAs of the invention. This DNA comprises sequences encoding MCT proteins (i.e., the “coding region”, indicated in each sequence in Appendix A), as well as 5′ untranslated sequences and 3′ untranslated sequences, also indicated in Appendix A. Alternatively, the nucleic acid molecule can comprise only the coding region of any of the sequences in Appendix A.

[0057] For the purposes of this application, it will be understood that each of the sequences set forth in Appendix A has an identifying RXA, RXN, or RXS number having the designation “RXA”, “RXN”, or “RXS” followed by 5 digits (i.e., RXA00775, RXN02994, or RXS03221). Each of these sequences comprises up to three parts: a 5′ upstream region, a coding region, and a downstream region. Each of these three regions is identified by the same RXA, RXN, or RXS designation to eliminate confusion. The recitation “one of the sequences in Appendix A”, then, refers to any of the sequences in Appendix A, which may be distinguished by their differing RXA, RXN, or RXS designations. The coding region of each of these sequences is translated into a corresponding amino acid sequence, which is set forth in Appendix B. The sequences of Appendix B are identified by the same RXA, RXN, or RXS designations as Appendix A, such that they can be readily correlated. For example, the amino acid sequences in Appendix B designated RXA00775, RXN02994, and RXS03221 are translations of the coding regions of the nucleotide sequence of nucleic acid molecules RXA00775, RXN02994, and RXS03221, respectively, in Appendix A. Each of the RXA, RXN, and RXS nucleotide and amino acid sequences of the invention has also been assigned a SEQ ID NO, as indicated in Table 1. For example, as set forth in Table 1, the nucleic acid sequence of RXA00774 is SEQ ID NO:7, and the amino acid sequence of RXA00774 is SEQ ID NO:8.

[0058] Several of the genes of the invention are “F-designated genes”. An F-designated gene includes those genes set forth in Table 1 which have an ‘F’ in front of the RXA, RXN, or RXS designation. For example, SEQ ID NO:21, designated, as indicated on Table 1, as “F RXA01245”, is an F-designated gene, as are SEQ ID NOs: 35, 39, and 43 (designated on Table 1 as “F RXA01164”, “F RXA01168”, and “F RXA02062”, respectively).

[0059] In one embodiment, the nucleic acid molecules of the present invention are not intended to include those compiled in Table 2. In the case of the dapD gene, a sequence for this gene was published in Wehrmann, A., et al. (1998) J. Bacteriol. 180 (12): 3159-3165. However, the sequence obtained by the inventors of the present application is significantly longer than the published version. It is believed that the published version relied on an incorrect start codon, and thus represents only a fragment of the actual coding region.

[0060] In another preferred embodiment, an isolated nucleic acid molecule of the invention comprises a nucleic acid molecule which is a complement of one of the nucleotide sequences shown in Appendix A, or a portion thereof. A nucleic acid molecule which is complementary to one of the nucleotide sequences shown in Appendix A is one which is sufficiently complementary to one of the nucleotide sequences shown in Appendix A such that it can hybridize to one of the nucleotide sequences shown in Appendix A, thereby forming a stable duplex.

[0061] In still another preferred embodiment, an isolated nucleic acid molecule of the invention comprises a nucleotide sequence which is at least about 50%, 51%, 52%, 53%, 54%, 55%, 56%, 57%, 58%, 59%, or 60%, preferably at least about 61%, 62%, 63%, 64%, 65%, 66%, 67%, 68%, 69%, or 70%%, more preferably at least about 71%, 72%, 73%, 74%, 75%, 76%, 77%, 78%, 79%, or 80%, 81%, 82%, 83%, 84%, 85%, 86%, 87%, 88%, 89%, or 90%, or 91%, 92%, 93%, 94%, and even more preferably at least about 95%, 96%, 97%, 98%, 99% or more homologous to a nucleotide sequence shown in Appendix A, or a portion thereof. Ranges and identity values intermediate to the above-recited ranges, (e.g., 70-90% identical or 80-95% identical) are also intended to be encompassed by the present invention. For example, ranges of identity values using a combination of any of the above values recited as upper and/or lower limits are intended to be included. In an additional preferred embodiment, an isolated nucleic acid molecule of the invention comprises a nucleotide sequence which hybridizes, e.g., hybridizes under stringent conditions, to one of the nucleotide sequences shown in Appendix A, or a portion thereof.

[0062] Moreover, the nucleic acid molecule of the invention can comprise only a portion of the coding region of one of the sequences in Appendix A, for example a fragment which can be used as a probe or primer or a fragment encoding a biologically active portion of an MCT protein. The nucleotide sequences determined from the cloning of the MCT genes from C. glutamicum allows for the generation of probes and primers designed for use in identifying and/or cloning MCT homologues in other cell types and organisms, as well as MCT homologues from other Corynebacteria or related species. The probe/primer typically comprises substantially purified oligonucleotide. The oligonucleotide typically comprises a region of nucleotide sequence that hybridizes under stringent conditions to at least about 12, preferably about 25, more preferably about 40, 50 or 75 consecutive nucleotides of a sense strand of one of the sequences set forth in Appendix A, an anti-sense sequence of one of the sequences set forth in Appendix A, or naturally occurring mutants thereof. Primers based on a nucleotide sequence of Appendix A can be used in PCR reactions to clone MCT homologues. Probes based on the MCT nucleotide sequences can be used to detect transcripts or genomic sequences encoding the same or homologous proteins. In preferred embodiments, the probe further comprises a label group attached thereto, e.g. the label group can be a radioisotope, a fluorescent compound, an enzyme, or an enzyme co-factor. Such probes can be used as a part of a diagnostic test kit for identifying cells which misexpress an MCT protein, such as by measuring a level of an MCT-encoding nucleic acid in a sample of cells, e.g., detecting MCT mRNA levels or determining whether a genomic MCT gene has been mutated or deleted.

[0063] In one embodiment, the nucleic acid molecule of the invention encodes a protein or portion thereof which includes an amino acid sequence which is sufficiently homologous to an amino acid sequence of Appendix B such that the protein or portion thereof maintains the ability to participate in the metabolism of compounds necessary for the construction of cellular membranes in C. glutamicum, or in the transport of molecules across these membranes. As used herein, the language “sufficiently homologous” refers to proteins or portions thereof which have amino acid sequences which include a minimum number of identical or equivalent (e.g., an amino acid residue which has a similar side chain as an amino acid residue in one of the sequences of Appendix B) amino acid residues to an amino acid sequence of Appendix B such that the protein or portion thereof is able to participate in the metabolism of compounds necessary for the construction of cellular membranes in C. glutamicum, or in the transport of molecules across these membranes. Protein members of such membrane component metabolic pathways or membrane transport systems, as described herein, may play a role in the production and secretion of one or more fine chemicals. Examples of such activities are also described herein. Thus, “the function of an MCT protein” contributes either directly or indirectly to the yield, production, and/or efficiency of production of one or more fine chemicals. Examples of MCT protein activities are set forth in Table 1.

[0064] In another embodiment, the protein is at least about 50-60%, preferably at least about 60-70%, and more preferably at least about 70-80%, 80-90%, 90-95%, and most preferably at least about 96%, 97%, 98%, 99% or more homologous to an entire amino acid sequence of Appendix B.

[0065] Portions of proteins encoded by the MCT nucleic acid molecules of the invention are preferably biologically active portions of one of the MCT proteins. As used herein, the term “biologically active portion of an MCT protein” is intended to include a portion, e.g., a domain/motif, of an MCT protein that participates in the metabolism of compounds necessary for the construction of cellular membranes in C. glutamicum, or in the transport of molecules across these membranes, or has an activity as set forth in Table 1. To determine whether an MCT protein or a biologically active portion thereof can participate in the metabolism of compounds necessary for the construction of cellular membranes in C. glutamicum, or in the transport of molecules across these membranes, an assay of enzymatic activity may be performed. Such assay methods are well known to those of ordinary skill in the art, as detailed in Example 8 of the Exemplification.

[0066] Additional nucleic acid fragments encoding biologically active portions of an MCT protein can be prepared by isolating a portion of one of the sequences in Appendix B, expressing the encoded portion of the MCT protein or peptide (e.g., by recombinant expression in vitro) and assessing the activity of the encoded portion of the MCT protein or peptide.

[0067] The invention further encompasses nucleic acid molecules that differ from one of the nucleotide sequences shown in Appendix A (and portions thereof) due to degeneracy of the genetic code and thus encode the same MCT protein as that encoded by the nucleotide sequences shown in Appendix A. In another embodiment, an isolated nucleic acid molecule of the invention has a nucleotide sequence encoding a protein having an amino acid sequence shown in Appendix B. In a still further embodiment, the nucleic acid molecule of the invention encodes a full length C. glutamicum protein which is substantially homologous to an amino acid sequence of Appendix B (encoded by an open reading frame shown in Appendix A).

[0068] It will be understood by one of ordinary skill in the art that in one embodiment the sequences of the invention are not meant to include the sequences of the prior art, such as those Genbank sequences set forth in Tables 2 or 4 which were available prior to the present invention. In one embodiment, the invention includes nucleotide and amino acid sequences having a percent identity to a nucleotide or amino acid sequence of the invention which is greater than that of a sequence of the prior art (e.g., a Genbank sequence (or the protein encoded by such a sequence) set forth in Tables 2 or 4). For example, the invention includes a nucleotide sequence which is greater than and/or at least 50% identical to the nucleotide sequence designated RXA00777 (SEQ ID NO:5), a nucleotide sequence which is greater than and/or at least 40% identical to the nucleotide sequence designated RXA02439 (SEQ ID NO:17), and a nucleotide sequence which is greater than and/or at least 39% identical to the nucleotide sequence designated RXA00002 (SEQ ID NO:23). One of ordinary skill in the art would be able to calculate the lower threshold of percent identity for any given sequence of the invention by examining the GAP-calculated percent identity scores set forth in Table 4 for each of the three top hits for the given sequence, and by subtracting the highest GAP-calculated percent identity from 100 percent. One of ordinary skill in the art will also appreciate that nucleic acid and amino acid sequences having percent identities greater than the lower threshold so calculated (e.g., at least 50%, 51%, 52%, 53%, 54%, 55%, 56%, 57%, 58%, 59%, or 60%, preferably at least about 61%, 62%, 63%, 64%, 65%, 66%, 67%, 68%, 69%, or 70%, more preferably at least about 71%, 72%, 73%, 74%, 75%, 76%, 77%, 78%, 79%, or 80%, 81%, 82%, 83%, 84%, 85%, 86%, 87%, 88%, 89%, or 90%, or 91%, 92%, 93%, 94%, and even more preferably at least about 95%, 96%, 97%, 98%, 99% or more identical) are also encompassed by the invention.

[0069] In addition to the C. glutamicum MCT nucleotide sequences shown in Appendix A, it will be appreciated by one of ordinary skill in the art that DNA sequence polymorphisms that lead to changes in the amino acid sequences of MCT proteins may exist within a population (e.g., the C. glutamicum population). Such genetic polymorphism in the MCT gene may exist among individuals within a population due to natural variation. As used herein, the terms “gene” and “recombinant gene” refer to nucleic acid molecules comprising an open reading frame encoding an MCT protein, preferably a C. glutamicum MCT protein. Such natural variations can typically result in 1-5% variance in the nucleotide sequence of the MCT gene. Any and all such nucleotide variations and resulting amino acid polymorphisms in MCT that are the result of natural variation and that do not alter the functional activity of MCT proteins are intended to be within the scope of the invention.

[0070] Nucleic acid molecules corresponding to natural variants and non-C. glutamicum homologues of the C. glutamicum MCT DNA of the invention can be isolated based on their homology to the C. glutamicum MCT nucleic acid disclosed herein using the C. glutamicum DNA, or a portion thereof, as a hybridization probe according to standard hybridization techniques under stringent hybridization conditions. Accordingly, in another embodiment, an isolated nucleic acid molecule of the invention is at least 15 nucleotides in length and hybridizes under stringent conditions to the nucleic acid molecule comprising a nucleotide sequence of Appendix A. In other embodiments, the nucleic acid is at least 30, 50, 100, 250 or more nucleotides in length. As used herein, the term “hybridizes under stringent conditions” is intended to describe conditions for hybridization and washing under which nucleotide sequences at least 60% homologous to each other typically remain hybridized to each other. Preferably, the conditions are such that sequences at least about 65%, more preferably at least about 70%, and even more preferably at least about 75% or more homologous to each other typically remain hybridized to each other. Such stringent conditions are known to those of ordinary skill in the art and can be found in Current Protocols in Molecular Biology, John Wiley & Sons, N.Y. (1989), 6.3.1-6.3.6. A preferred, non-limiting example of stringent hybridization conditions are hybridization in 6× sodium chloride/sodium citrate (SSC) at about 45° C., followed by one or more washes in 0.2×SSC, 0.1% SDS at 50-65° C. Preferably, an isolated nucleic acid molecule of the invention that hybridizes under stringent conditions to a sequence of Appendix A corresponds to a naturally-occurring nucleic acid molecule. As used herein, a “naturally-occurring” nucleic acid molecule refers to an RNA or DNA molecule having a nucleotide sequence that occurs in nature (e.g., encodes a natural protein). In one embodiment, the nucleic acid encodes a natural C. glutamicum MCT protein.

[0071] In addition to naturally-occurring variants of the MCT sequence that may exist in the population, one of ordinary skill in the art will further appreciate that changes can be introduced by mutation into a nucleotide sequence of Appendix A, thereby leading to changes in the amino acid sequence of the encoded MCT protein, without altering the functional ability of the MCT protein. For example, nucleotide substitutions leading to amino acid substitutions at “non-essential” amino acid residues can be made in a sequence of Appendix A. A “non-essential” amino acid residue is a residue that can be altered from the wild-type sequence of one of the MCT proteins (Appendix B) without altering the activity of said MCT protein, whereas an “essential” amino acid residue is required for MCT protein activity. Other amino acid residues, however, (e.g., those that are not conserved or only semi-conserved in the domain having MCT activity) may not be essential for activity and thus are likely to be amenable to alteration without altering MCT activity.

[0072] Accordingly, another aspect of the invention pertains to nucleic acid molecules encoding MCT proteins that contain changes in amino acid residues that are not essential for MCT activity. Such MCT proteins differ in amino acid sequence from a sequence contained in Appendix B yet retain at least one of the MCT activities described herein. In one embodiment, the isolated nucleic acid molecule comprises a nucleotide sequence encoding a protein, wherein the protein comprises an amino acid sequence at least about 50% homologous to an amino acid sequence of Appendix B and is capable of participate in the metabolism of compounds necessary for the construction of cellular membranes in C. glutamicum, or in the transport of molecules across these membranes, or has one or more activities set forth in Table 1. Preferably, the protein encoded by the nucleic acid molecule is at least about 50-60% homologous to one of the sequences in Appendix B, more preferably at least about 60-70% homologous to one of the sequences in Appendix B, even more preferably at least about 70-80%, 80-90%, 90-95% homologous to one of the sequences in Appendix B, and most preferably at least about 96%, 97%, 98%, or 99% homologous to one of the sequences in Appendix B.

[0073] To determine the percent homology of two amino acid sequences (e.g., one of the sequences of Appendix B and a mutant form thereof) or of two nucleic acids, the sequences are aligned for optimal comparison purposes (e.g., gaps can be introduced in the sequence of one protein or nucleic acid for optimal alignment with the other protein or nucleic acid). The amino acid residues or nucleotides at corresponding amino acid positions or nucleotide positions are then compared. When a position in one sequence (e.g., one of the sequences of Appendix B) is occupied by the same amino acid residue or nucleotide as the corresponding position in the other sequence (e.g., a mutant form of the sequence selected from Appendix B), then the molecules are homologous at that position (i.e., as used herein amino acid or nucleic acid “homology” is equivalent to amino acid or nucleic acid “identity”). The percent homology between the two sequences is a function of the number of identical positions shared by the sequences (i.e., % homology=# of identical positions/total # of positions×100).

[0074] An isolated nucleic acid molecule encoding an MCT protein homologous to a protein sequence of Appendix B can be created by introducing one or more nucleotide substitutions, additions or deletions into a nucleotide sequence of Appendix A such that one or more amino acid substitutions, additions or deletions are introduced into the encoded protein. Mutations can be introduced into one of the sequences of Appendix A by standard techniques, such as site-directed mutagenesis and PCR-mediated mutagenesis. Preferably, conservative amino acid substitutions are made at one or more predicted non-essential amino acid residues. A “conservative amino acid substitution” is one in which the amino acid residue is replaced with an amino acid residue having a similar side chain. Families of amino acid residues having similar side chains have been defined in the art. These families include amino acids with basic side chains (e.g., lysine, arginine, histidine), acidic side chains (e.g., aspartic acid, glutamic acid), uncharged polar side chains (e.g., glycine, asparagine, glutamine, serine, threonine, tyrosine, cysteine), nonpolar side chains (e.g., alanine, valine, leucine, isoleucine, proline, phenylalanine, methionine, tryptophan), beta-branched side chains (e.g., threonine, valine, isoleucine) and aromatic side chains (e.g., tyrosine, phenylalanine, tryptophan, histidine). Thus, a predicted nonessential amino acid residue in an MCT protein is preferably replaced with another amino acid residue from the same side chain family. Alternatively, in another embodiment, mutations can be introduced randomly along all or part of an MCT coding sequence, such as by saturation mutagenesis, and the resultant mutants can be screened for an MCT activity described herein to identify mutants that retain MCT activity. Following mutagenesis of one of the sequences of Appendix A, the encoded protein can be expressed recombinantly and the activity of the protein can be determined using, for example, assays described herein (see Example 8 of the Exemplification).

[0075] In addition to the nucleic acid molecules encoding MCT proteins described above, another aspect of the invention pertains to isolated nucleic acid molecules which are antisense thereto. An “antisense” nucleic acid comprises a nucleotide sequence which is complementary to a “sense” nucleic acid encoding a protein, e.g., complementary to the coding strand of a double-stranded cDNA molecule or complementary to an mRNA sequence. Accordingly, an antisense nucleic acid can hydrogen bond to a sense nucleic acid. The antisense nucleic acid can be complementary to an entire MCT coding strand, or to only a portion thereof. In one embodiment, an antisense nucleic acid molecule is antisense to a “coding region” of the coding strand of a nucleotide sequence encoding an MCT protein. The term “coding region” refers to the region of the nucleotide sequence comprising codons which are translated into amino acid residues (e.g., the entire coding region of NO. 3 (RXA00777) comprises nucleotides 1 to 1065). In another embodiment, the antisense nucleic acid molecule is antisense to a “noncoding region” of the coding strand of a nucleotide sequence encoding MCT. The term “noncoding region” refers to 5′ and 3′ sequences which flank the coding region that are not translated into amino acids (i.e., also referred to as 5′ and 3′ untranslated regions).

[0076] Given the coding strand sequences encoding MCT disclosed herein (e.g., the sequences set forth in Appendix A), antisense nucleic acids of the invention can be designed according to the rules of Watson and Crick base pairing. The antisense nucleic acid molecule can be complementary to the entire coding region of MCT mRNA, but more preferably is an oligonucleotide which is antisense to only a portion of the coding or noncoding region of MCT mRNA. For example, the antisense oligonucleotide can be complementary to the region surrounding the translation start site of MCT mRNA. An antisense oligonucleotide can be, for example, about 5, 10, 15, 20, 25, 30, 35, 40, 45 or 50 nucleotides in length. An antisense nucleic acid of the invention can be constructed using chemical synthesis and enzymatic ligation reactions using procedures known in the art. For example, an antisense nucleic acid (e.g., an antisense oligonucleotide) can be chemically synthesized using naturally occurring nucleotides or variously modified nucleotides designed to increase the biological stability of the molecules or to increase the physical stability of the duplex formed between the antisense and sense nucleic acids, e.g., phosphorothioate derivatives and acridine substituted nucleotides can be used. Examples of modified nucleotides which can be used to generate the antisense nucleic acid include 5-fluorouracil, 5-bromouracil, 5-chlorouracil, 5-iodouracil, hypoxanthine, xanthine, 4-acetylcytosine, 5-(carboxyhydroxylmethyl) uracil, 5-carboxymethylaminomethyl-2-thiouridine, 5-carboxymethylaminomethyluracil, dihydrouracil, beta-D-galactosylqueosine, inosine, N6-isopentenyladenine, 1-methylguanine, 1-methylinosine, 2,2-dimethylguanine, 2-methyladenine, 2-methylguanine, 3-methylcytosine, 5-methylcytosine, N6-adenine, 7-methylguanine, 5-methylaminomethyluracil, 5-methoxyaminomethyl-2-thiouracil, beta-D-mannosylqueosine, 5′-methoxycarboxymethyluracil, 5-methoxyuracil, 2-methylthio-N-6-isopentenyladenine, uracil-5-oxyacetic acid (v), wybutoxosine, pseudouracil, queosine, 2-thiocytosine, 5-methyl-2-thiouracil, 2-thiouracil, 4-thiouracil, 5-methyluracil, uracil-5-oxyacetic acid methylester, uracil-5-oxyacetic acid (v), 5-methyl-2-thiouracil, 3-(3-amino-3-N-2-carboxypropyl) uracil, (acp3)w, and 2,6-diaminopurine. Alternatively, the antisense nucleic acid can be produced biologically using an expression vector into which a nucleic acid has been subcloned in an antisense orientation (i.e., RNA transcribed from the inserted nucleic acid will be of an antisense orientation to a target nucleic acid of interest, described further in the following subsection).

[0077] The antisense nucleic acid molecules of the invention are typically administered to a cell or generated in situ such that they hybridize with or bind to cellular mRNA and/or genomic DNA encoding an MCT protein to thereby inhibit expression of the protein, e.g., by inhibiting transcription and/or translation. The hybridization can be by conventional nucleotide complementarity to form a stable duplex, or, for example, in the case of an antisense nucleic acid molecule which binds to DNA duplexes, through specific interactions in the major groove of the double helix. The antisense molecule can be modified such that it specifically binds to a receptor or an antigen expressed on a selected cell surface, e.g., by linking the antisense nucleic acid molecule to a peptide or an antibody which binds to a cell surface receptor or antigen. The antisense nucleic acid molecule can also be delivered to cells using the vectors described herein. To achieve sufficient intracellular concentrations of the antisense molecules, vector constructs in which the antisense nucleic acid molecule is placed under the control of a strong prokaryotic, viral, or eukaryotic promoter are preferred.

[0078] In yet another embodiment, the antisense nucleic acid molecule of the invention is an α-anomeric nucleic acid molecule. An α-anomeric nucleic acid molecule forms specific double-stranded hybrids with complementary RNA in which, contrary to the usual β-units, the strands run parallel to each other (Gaultier et al. (1987) Nucleic Acids. Res. 15: 6625-6641). The antisense nucleic acid molecule can also comprise a 2′-o-methylribonucleotide (Inoue et al. (1987) Nucleic Acids Res. 15: 6131-6148) or a chimeric RNA-DNA analogue (Inoue et al. (1987) FEBS Lett. 215: 327-330).

[0079] In still another embodiment, an antisense nucleic acid of the invention is a ribozyme. Ribozymes are catalytic RNA molecules with ribonuclease activity which are capable of cleaving a single-stranded nucleic acid, such as an mRNA, to which they have a complementary region. Thus, ribozymes (e.g., hammerhead ribozymes (described in Haselhoff and Gerlach (1988) Nature 334: 585-591)) can be used to catalytically cleave MCT mRNA transcripts to thereby inhibit translation of MCT mRNA. A ribozyme having specificity for an MCT-encoding nucleic acid can be designed based upon the nucleotide sequence of an MCT DNA disclosed herein (i.e., NO. 3 (RXA00777 in Appendix A)). For example, a derivative of a Tetrahymena L-19 IVS RNA can be constructed in which the nucleotide sequence of the active site is complementary to the nucleotide sequence to be cleaved in an MCT-encoding mRNA. See, e.g., Cech et al. U.S. Pat. No. 4,987,071 and Cech et al. U.S. Pat. No. 5,116,742. Alternatively, MCT mRNA can be used to select a catalytic RNA having a specific ribonuclease activity from a pool of RNA molecules. See, e.g., Bartel, D. and Szostak, J. W. (1993) Science 261: 1411-1418.

[0080] Alternatively, MCT gene expression can be inhibited by targeting nucleotide sequences complementary to the regulatory region of an MCT nucleotide sequence (e.g., an MCT promoter and/or enhancers) to form triple helical structures that prevent transcription of an MCT gene in target cells. See generally, Helene, C. (1991) Anticancer Drug Des. 6(6): 569-84; Helene, C. et al. (1992) Ann. N.Y. Acad. Sci. 660: 27-36; and Maher, L. J. (1992) Bioassays 14(12): 807-15.

B. Recombinant Expression Vectors and Host Cells

[0081] Another aspect of the invention pertains to vectors, preferably expression vectors, containing a nucleic acid encoding an MCT protein (or a portion thereof). As used herein, the term “vector” refers to a nucleic acid molecule capable of transporting another nucleic acid to which it has been linked. One type of vector is a “plasmid”, which refers to a circular double stranded DNA loop into which additional DNA segments can be ligated. Another type of vector is a viral vector, wherein additional DNA segments can be ligated into the viral genome. Certain vectors are capable of autonomous replication in a host cell into which they are introduced (e.g., bacterial vectors having a bacterial origin of replication and episomal mammalian vectors). Other vectors (e.g., non-episomal mammalian vectors) are integrated into the genome of a host cell upon introduction into the host cell, and thereby are replicated along with the host genome. Moreover, certain vectors are capable of directing the expression of genes to which they are operatively linked. Such vectors are referred to herein as “expression vectors”. In general, expression vectors of utility in recombinant DNA techniques are often in the form of plasmids. In the present specification, “plasmid” and “vector” can be used interchangeably as the plasmid is the most commonly used form of vector. However, the invention is intended to include such other forms of expression vectors, such as viral vectors (e.g., replication defective retroviruses, adenoviruses and adeno-associated viruses), which serve equivalent functions.

[0082] The recombinant expression vectors of the invention comprise a nucleic acid of the invention in a form suitable for expression of the nucleic acid in a host cell, which means that the recombinant expression vectors include one or more regulatory sequences, selected on the basis of the host cells to be used for expression, which is operatively linked to the nucleic acid sequence to be expressed. Within a recombinant expression vector, “operably linked” is intended to mean that the nucleotide sequence of interest is linked to the regulatory sequence(s) in a manner which allows for expression of the nucleotide sequence (e.g., in an in vitro transcription/translation system or in a host cell when the vector is introduced into the host cell). The term “regulatory sequence” is intended to include promoters, enhancers and other expression control elements (e.g., polyadenylation signals). Such regulatory sequences are described, for example, in Goeddel; Gene Expression Technology: Methods in Enzymology 185, Academic Press, San Diego, Calif. (1990). Regulatory sequences include those which direct constitutive expression of a nucleotide sequence in many types of host cell and those which direct expression of the nucleotide sequence only in certain host cells. Preferred regulatory sequences are, for example, promoters such as cos-, tac-, trp-, tet-, trp-tet-, lpp-, lac-, lpp-lac-, lacI^{q}-, T7-, T5-, T3-, gal-, trc-, ara-, SP6-, arny, SPO2, λ-P_{R}- or λ P_{L}, which are used preferably in bacteria. Additional regulatory sequences are, for example, promoters from yeasts and fungi, such as ADC1, MFα, AC, P-60, CYC1, GAPDH, TEF, rp28, ADH, promoters from plants such as CaMV/35S, SSU, OCS, lib4, usp, STLS1, B33, nos or ubiquitin- or phaseolin-promoters. It is also possible to use artificial promoters. It will be appreciated by one of ordinary skill in the art that the design of the expression vector can depend on such factors as the choice of the host cell to be transformed, the level of expression of protein desired, etc. The expression vectors of the invention can be introduced into host cells to thereby produce proteins or peptides, including fusion proteins or peptides, encoded by nucleic acids as described herein (e.g., MCT proteins, mutant forms of MCT proteins, fusion proteins, etc.).

[0083] The recombinant expression vectors of the invention can be designed for expression of MCT proteins in prokaryotic or eukaryotic cells. For example, MCT genes can be expressed in bacterial cells such as C. glutamicum, insect cells (using baculovirus expression vectors), yeast and other fungal cells (see Romanos, M. A. et al. (1992) “Foreign gene expression in yeast: a review”, Yeast 8: 423-488; van den Hondel, C. A. M. J. J. et al. (1991) “Heterologous gene expression in filamentous fungi” in: More Gene Manipulations in Fungi, J. W. Bennet & L. L. Lasure, eds., p. 396-428: Academic Press: San Diego; and van den Hondel, C. A. M. J. J. & Punt, P. J. (1991) “Gene transfer systems and vector development for filamentous fungi, in: Applied Molecular Genetics of Fungi, Peberdy, J. F. et al., eds., p. 1-28, Cambridge University Press: Cambridge), algae and multicellular plant cells (see Schmidt, R. and Willmitzer, L. (1988) High efficiency Agrobacterium tumefaciens—mediated transformation of Arabidopsis thaliana leaf and cotyledon explants” Plant Cell Rep.: 583-586), or mammalian cells. Suitable host cells are discussed further in Goeddel, Gene Expression Technology: Methods in Enzymology 185, Academic Press, San Diego, Calif. (1990). Alternatively, the recombinant expression vector can be transcribed and translated in vitro, for example using T7 promoter regulatory sequences and T7 polymerase.

[0084] Expression of proteins in prokaryotes is most often carried out with vectors containing constitutive or inducible promoters directing the expression of either fusion or non-fusion proteins. Fusion vectors add a number of amino acids to a protein encoded therein, usually to the amino terminus of the recombinant protein but also to the C-terminus or fused within suitable regions in the proteins. Such fusion vectors typically serve three purposes: 1) to increase expression of recombinant protein; 2) to increase the solubility of the recombinant protein; and 3) to aid in the purification of the recombinant protein by acting as a ligand in affinity purification. Often, in fusion expression vectors, a proteolytic cleavage site is introduced at the junction of the fusion moiety and the recombinant protein to enable separation of the recombinant protein from the fusion moiety subsequent to purification of the fusion protein. Such enzymes, and their cognate recognition sequences, include Factor Xa, thrombin and enterokinase.

[0085] Typical fusion expression vectors include pGEX (Pharmacia Biotech Inc; Smith, D. B. and Johnson, K. S. (1988) Gene 67: 31-40), pMAL (New England Biolabs, Beverly, Mass.) and pRIT5 (Pharmacia, Piscataway, N.J.) which fuse glutathione S-transferase (GST), maltose E binding protein, or protein A, respectively, to the target recombinant protein. In one embodiment, the coding sequence of the MCT protein is cloned into a pGEX expression vector to create a vector encoding a fusion protein comprising, from the N-terminus to the C-terminus, GST-thrombin cleavage site-X protein. The fusion protein can be purified by affinity chromatography using glutathione-agarose resin. Recombinant MCT protein unfused to GST can be recovered by cleavage of the fusion protein with thrombin.

[0086] Examples of suitable inducible non-fusion E. coli expression vectors include pTrc (Amann et al., (1988) Gene 69: 301-315) pLG338, pACYC184, pBR322, pUC18, pUC19, pKC30, pRep4, pHS1, pHS2, pPLc236, pMBL24, pLG200, pUR290, pIN-III113-B1, λgt11, pBdCl, and pET 11d (Studier et al., Gene Expression Technology: Methods in Enzymology 185, Academic Press, San Diego, Calif. (1990) 60-89; and Pouwels et al., eds. (1985) Cloning Vectors. Elsevier: New York IBSN 0 444 904018). Target gene expression from the pTrc vector relies on host RNA polymerase transcription from a hybrid trp-lac fusion promoter. Target gene expression from the pET 11d vector relies on transcription from a T7 gn10-lac fusion promoter mediated by a coexpressed viral RNA polymerase (T7 gn1). This viral polymerase is supplied by host strains BL21(DE3) or HMS 174(DE3) from a resident λ prophage harboring a T7 gn1 gene under the transcriptional control of the lacUV 5 promoter. For transformation of other varieties of bacteria, appropriate vectors may be selected. For example, the plasmids pIJ101, pIJ364, pIJ702 and pIJ361 are known to be useful in transforming Streptomyces, while plasmids pUB110, pC194, or pBD214 are suited for transformation of Bacillus species. Several plasmids of use in the transfer of genetic information into Corynebacterium include pHM1519, pBL1, pSA77, or pAJ667 (Pouwels et al., eds. (1985) Cloning Vectors. Elsevier: New York IBSN 0 444 904018).

[0087] One strategy to maximize recombinant protein expression is to express the protein in a host bacteria with an impaired capacity to proteolytically cleave the recombinant protein (Gottesman, S., Gene Expression Technology: Methods in Enzymology 185, Academic Press, San Diego, Calif. (1990) 119-128). Another strategy is to alter the nucleic acid sequence of the nucleic acid to be inserted into an expression vector so that the individual codons for each amino acid are those preferentially utilized in the bacterium chosen for expression, such as C. glutamicum (Wada et al. (1992) Nucleic Acids Res. 20: 2111-2118). Such alteration of nucleic acid sequences of the invention can be carried out by standard DNA synthesis techniques.

[0088] In another embodiment, the MCT protein expression vector is a yeast expression vector. Examples of vectors for expression in yeast S. cerevisiae include pYepSec1 (Baldari, et al., (1987) Embo J. 6: 229-234), 2μ, pAG-1, Yep6, Yep13, pEMBLYe23, pMFa (Kurjan and Herskowitz, (1982) Cell 30: 933-943), pJRY88 (Schultz et al., (1987) Gene 54: 113-123), and pYES2 (Invitrogen Corporation, San Diego, Calif.). Vectors and methods for the construction of vectors appropriate for use in other fungi, such as the filamentous fungi, include those detailed in: van den Hondel, C. A. M. J. J. & Punt, P. J. (1991) “Gene transfer systems and vector development for filamentous fungi, in: Applied Molecular Genetics of Fungi, J. F. Peberdy, et al., eds., p. 1-28, Cambridge University Press: Cambridge, and Pouwels et al., eds. (1985) Cloning Vectors. Elsevier: New York (IBSN 0 444 904018).

[0089] Alternatively, the MCT proteins of the invention can be expressed in insect cells using baculovirus expression vectors. Baculovirus vectors available for expression of proteins in cultured insect cells (e.g., Sf9 cells) include the pAc series (Smith et al. (1983) Mol. Cell Biol. 3: 2156-2165) and the pVL series (Lucklow and Summers (1989) Virology 170: 31-39).

[0090] In another embodiment, the MCT proteins of the invention may be expressed in unicellular plant cells (such as algae) or in plant cells from higher plants (e.g., the spermatophytes, such as crop plants). Examples of plant expression vectors include those detailed in: Becker, D., Kemper, E., Schell, J. and Masterson, R. (1992) “New plant binary vectors with selectable markers located proximal to the left border”, Plant Mol. Biol. 20: 1195-1197; and Bevan, M. W. (1984) “Binary Agrobacterium vectors for plant transformation”, Nucl. Acid. Res. 12: 8711-8721, and include pLGV23, pGHlac+, pBIN19, pAK2004, and pDH51 (Pouwels et al., eds. (1985) Cloning Vectors. Elsevier: New York IBSN 0 444 904018).

[0091] In yet another embodiment, a nucleic acid of the invention is expressed in mammalian cells using a mammalian expression vector. Examples of mammalian expression vectors include pCDM8 (Seed, B. (1987) Nature 329: 840) and pMT2PC (Kaufman et al. (1987) EMBO J. 6: 187-195). When used in mammalian cells, the expression vector's control functions are often provided by viral regulatory elements. For example, commonly used promoters are derived from polyoma, Adenovirus 2, cytomegalovirus and Simian Virus 40. For other suitable expression systems for both prokaryotic and eukaryotic cells see chapters 16 and 17 of Sambrook, J., Fritsh, E. F., and Maniatis, T. Molecular Cloning: A Laboratory Manual. 2nd, ed., Cold Spring Harbor Laboratory, Cold Spring Harbor Laboratory Press, Cold Spring Harbor, N.Y., 1989.

[0092] In another embodiment, the recombinant mammalian expression vector is capable of directing expression of the nucleic acid preferentially in a particular cell type (e.g., tissue-specific regulatory elements are used to express the nucleic acid). Tissue-specific regulatory elements are known in the art. Non-limiting examples of suitable tissue-specific promoters include the albumin promoter (liver-specific; Pinkert et al. (1987) Genes Dev. 1: 268-277), lymphoid-specific promoters (Calame and Eaton (1988) Adv. Immunol. 43: 235-275), in particular promoters of T cell receptors (Winoto and Baltimore (1989) EMBO J. 8: 729-733) and immunoglobulins (Banerji et al. (1983) Cell 33: 729-740; Queen and Baltimore (1983) Cell 33: 741-748), neuron-specific promoters (e.g., the neurofilament promoter; Byrne and Ruddle (1989) PNAS 86: 5473-5477), pancreas-specific promoters (Edlund et al. (1985) Science 230: 912-916), and mammary gland-specific promoters (e.g., milk whey promoter; U.S. Pat. No. 4,873,316 and European Application Publication No. 264,166). Developmentally-regulated promoters are also encompassed, for example the murine hox promoters (Kessel and Gruss (1990) Science 249: 374-379) and the α-fetoprotein promoter (Campes and Tilghman (1989) Genes Dev. 3: 537-546).

[0093] The invention further provides a recombinant expression vector comprising a DNA molecule of the invention cloned into the expression vector in an antisense orientation. That is, the DNA molecule is operatively linked to a regulatory sequence in a manner which allows for expression (by transcription of the DNA molecule) of an RNA molecule which is antisense to MCT mRNA. Regulatory sequences operatively linked to a nucleic acid cloned in the antisense orientation can be chosen which direct the continuous expression of the antisense RNA molecule in a variety of cell types, for instance viral promoters and/or enhancers, or regulatory sequences can be chosen which direct constitutive, tissue specific or cell type specific expression of antisense RNA. The antisense expression vector can be in the form of a recombinant plasmid, phagemid or attenuated virus in which antisense nucleic acids are produced under the control of a high efficiency regulatory region, the activity of which can be determined by the cell type into which the vector is introduced. For a discussion of the regulation of gene expression using antisense genes see Weintraub, H. et al., Antisense RNA as a molecular tool for genetic analysis, Reviews—Trends in Genetics, Vol. 1(1) 1986.

[0094] Another aspect of the invention pertains to host cells into which a recombinant expression vector of the invention has been introduced. The terms “host cell” and “recombinant host cell” are used interchangeably herein. It is understood that such terms refer not only to the particular subject cell but to the progeny or potential progeny of such a cell. Because certain modifications may occur in succeeding generations due to either mutation or environmental influences, such progeny may not, in fact, be identical to the parent cell, but are still included within the scope of the term as used herein.

[0095] A host cell can be any prokaryotic or eukaryotic cell. For example, an MCT protein can be expressed in bacterial cells such as C. glutamicum, insect cells, yeast or mammalian cells (such as Chinese hamster ovary cells (CHO) or COS cells). Other suitable host cells are known to one of ordinary skill in the art. Microorganisms related to Corynebacterium glutamicum which may be conveniently used as host cells for the nucleic acid and protein molecules of the invention are set forth in Table 3.

[0096] Vector DNA can be introduced into prokaryotic or eukaryotic cells via conventional transformation or transfection techniques. As used herein, the terms “transformation” and “transfection”, “conjugation” and “transduction” are intended to refer to a variety of art-recognized techniques for introducing foreign nucleic acid (e.g., linear DNA or RNA (e.g., a linearized vector or a gene construct alone without a vector) or nucleic acid in the form of a vector (e.g., a plasmid, phage, phasmid, phagemid, transposon or other DNA) into a host cell, including calcium phosphate or calcium chloride co-precipitation, DEAE-dextran-mediated transfection, lipofection, natural competence, chemical-mediated transfer, or electroporation. Suitable methods for transforming or transfecting host cells can be found in Sambrook, et al. (Molecular Cloning: A Laboratory Manual. 2nd, ed., Cold Spring Harbor Laboratory, Cold Spring Harbor Laboratory Press, Cold Spring Harbor, N.Y., 1989), and other laboratory manuals.

[0097] For stable transfection of mammalian cells, it is known that, depending upon the expression vector and transfection technique used, only a small fraction of cells may integrate the foreign DNA into their genome. In order to identify and select these integrants, a gene that encodes a selectable marker (e.g., resistance to antibiotics) is generally introduced into the host cells along with the gene of interest. Preferred selectable markers include those which confer resistance to drugs, such as G418, hygromycin and methotrexate. Nucleic acid encoding a selectable marker can be introduced into a host cell on the same vector as that encoding an MCT protein or can be introduced on a separate vector. Cells stably transfected with the introduced nucleic acid can be identified by, for example, drug selection (e.g., cells that have incorporated the selectable marker gene will survive, while the other cells die).

[0098] To create a homologous recombinant microorganism, a vector is prepared which contains at least a portion of an MCT gene into which a deletion, addition or substitution has been introduced to thereby alter, e.g., functionally disrupt, the MCT gene. Preferably, this MCT gene is a Corynebacterium glutamicum MCT gene, but it can be a homologue from a related bacterium or even from a mammalian, yeast, or insect source. In a preferred embodiment, the vector is designed such that, upon homologous recombination, the endogenous MCT gene is functionally disrupted (i.e., no longer encodes a functional protein; also referred to as a “knock out” vector). Alternatively, the vector can be designed such that, upon homologous recombination, the endogenous MCT gene is mutated or otherwise altered but still encodes functional protein (e.g., the upstream regulatory region can be altered to thereby alter the expression of the endogenous MCT protein). In the homologous recombination vector, the altered portion of the MCT gene is flanked at its 5′ and 3′ ends by additional nucleic acid of the MCT gene to allow for homologous recombination to occur between the exogenous MCT gene carried by the vector and an endogenous MCT gene in a microorganism. The additional flanking MCT nucleic acid is of sufficient length for successful homologous recombination with the endogenous gene. Typically, several kilobases of flanking DNA (both at the 5′ and 3′ ends) are included in the vector (see e.g., Thomas, K. R., and Capecchi, M. R. (1987) Cell 51: 503 for a description of homologous recombination vectors). The vector is introduced into a microorganism (e.g., by electroporation) and cells in which the introduced MCT gene has homologously recombined with the endogenous MCT gene are selected, using art-known techniques.

[0099] In another embodiment, recombinant microorganisms can be produced which contain selected systems which allow for regulated expression of the introduced gene. For example, inclusion of an MCT gene on a vector placing it under control of the lac operon permits expression of the MCT gene only in the presence of IPTG. Such regulatory systems are well known in the art.

[0100] In another embodiment, an endogenous MCT gene in a host cell is disrupted (e.g., by homologous recombination or other genetic means known in the art) such that expression of its protein product does not occur. In another embodiment, an endogenous or introduced MCT gene in a host cell has been altered by one or more point mutations, deletions, or inversions, but still encodes a functional MCT protein. In still another embodiment, one or more of the regulatory regions (e.g., a promoter, repressor, or inducer) of an MCT gene in a microorganism has been altered (e.g., by deletion, truncation, inversion, or point mutation) such that the expression of the MCT gene is modulated. One of ordinary skill in the art will appreciate that host cells containing more than one of the described MCT gene and protein modifications may be readily produced using the methods of the invention, and are meant to be included in the present invention.

[0101] A host cell of the invention, such as a prokaryotic or eukaryotic host cell in culture, can be used to produce (i.e., express) an MCT protein. Accordingly, the invention further provides methods for producing MCT proteins using the host cells of the invention. In one embodiment, the method comprises culturing the host cell of invention (into which a recombinant expression vector encoding an MCT protein has been introduced, or into which genome has been introduced a gene encoding a wild-type or altered MCT protein) in a suitable medium until MCT protein is produced. In another embodiment, the method further comprises isolating MCT proteins from the medium or the host cell.

C. Isolated MCT Proteins

[0102] Another aspect of the invention pertains to isolated MCT proteins, and biologically active portions thereof. An “isolated” or “purified” protein or biologically active portion thereof is substantially free of cellular material when produced by recombinant DNA techniques, or chemical precursors or other chemicals when chemically synthesized. The language “substantially free of cellular material” includes preparations of MCT protein in which the protein is separated from cellular components of the cells in which it is naturally or recombinantly produced. In one embodiment, the language “substantially free of cellular material” includes preparations of MCT protein having less than about 30% (by dry weight) of non-MCT protein (also referred to herein as a “contaminating protein”), more preferably less than about 20% of non-MCT protein, still more preferably less than about 10% of non-MCT protein, and most preferably less than about 5% non-MCT protein. When the MCT protein or biologically active portion thereof is recombinantly produced, it is also preferably substantially free of culture medium, i.e., culture medium represents less than about 20%, more preferably less than about 10%, and most preferably less than about 5% of the volume of the protein preparation. The language “substantially free of chemical precursors or other chemicals” includes preparations of MCT protein in which the protein is separated from chemical precursors or other chemicals which are involved in the synthesis of the protein. In one embodiment, the language “substantially free of chemical precursors or other chemicals” includes preparations of MCT protein having less than about 30% (by dry weight) of chemical precursors or non-MCT chemicals, more preferably less than about 20% chemical precursors or non-MCT chemicals, still more preferably less than about 10% chemical precursors or non-MCT chemicals, and most preferably less than about 5% chemical precursors or non-MCT chemicals. In preferred embodiments, isolated proteins or biologically active portions thereof lack contaminating proteins from the same organism from which the MCT protein is derived. Typically, such proteins are produced by recombinant expression of, for example, a C. glutamicum MCT protein in a microorganism such as C. glutamicum.

[0103] An isolated MCT protein or a portion thereof of the invention can participate in the metabolism of compounds necessary for the construction of cellular membranes in C. glutamicum, or in the transport of molecules across these membranes, or has one or more of the activities set forth in Table 1. In preferred embodiments, the protein or portion thereof comprises an amino acid sequence which is sufficiently homologous to an amino acid sequence of Appendix B such that the protein or portion thereof maintains the ability participate in the metabolism of compounds necessary for the construction of cellular membranes in C. glutamicum, or in the transport of molecules across these membranes. The portion of the protein is preferably a biologically active portion as described herein. In another preferred embodiment, an MCT protein of the invention has an amino acid sequence shown in Appendix B. In yet another preferred embodiment, the MCT protein has an amino acid sequence which is encoded by a nucleotide sequence which hybridizes, e.g., hybridizes under stringent conditions, to a nucleotide sequence of Appendix A. In still another preferred embodiment, the MCT protein has an amino acid sequence which is encoded by a nucleotide sequence that is at least about 50%, 51%, 52%, 53%, 54%, 55%, 56%, 57%, 58%, 59%, or 60%, preferably at least about 61%, 62%, 63%, 64%, 65%, 66%, 67%, 68%, 69%, or 70%, more preferably at least about 71%, 72%, 73%, 74%, 75%, 76%, 77%, 78%, 79%, or 80%, 81%, 82%, 83%, 84%, 85%, 86%, 87%, 88%, 89%, or 90%, or 91%, 92%, 93%, 94%, and even more preferably at least about 95%, 96%, 97%, 98%, 99% or more homologous to one of the nucleic acid sequences of Appendix A, or a portion thereof. Ranges and identity values intermediate to the above-recited values, (e.g., 70-90% identical or 80-95% identical) are also intended to be encompassed by the present invention. For example, ranges of identity values using a combination of any of the above values recited as upper and/or lower limits are intended to be included. The preferred MCT proteins of the present invention also preferably possess at least one of the MCT activities described herein. For example, a preferred MCT protein of the present invention includes an amino acid sequence encoded by a nucleotide sequence which hybridizes, e.g., hybridizes under stringent conditions, to a nucleotide sequence of Appendix A, and which can participate in the metabolism of compounds necessary for the construction of cellular membranes in C. glutamicum, or in the transport of molecules across these membranes, or which has one or more of the activities set forth in Table 1.

[0104] In other embodiments, the MCT protein is substantially homologous to an amino acid sequence of Appendix B and retains the functional activity of the protein of one of the sequences of Appendix B yet differs in amino acid sequence due to natural variation or mutagenesis, as described in detail in subsection I above. Accordingly, in another embodiment, the MCT protein is a protein which comprises an amino acid sequence which is at least about 50%, 51%, 52%, 53%, 54%, 55%, 56%, 57%, 58%, 59%, or 60%, preferably at least about 61%, 62%, 63%, 64%, 65%, 66%, 67%, 68%, 69%, or 70%, more preferably at least about 71%, 72%, 73%, 74%, 75%, 76%, 77%, 78%, 79%, or 80%, 81%, 82%, 83%, 84%, 85%, 86%, 87%, 88%, 89%, or 90%, or 91%, 92%, 93%, 94%, and even more preferably at least about 95%, 96%, 97%, 98%, 99% or more homologous to an entire amino acid sequence of Appendix B and which has at least one of the MCT activities described herein. Ranges and identity values intermediate to the above-recited values, (e.g., 70-90% identical or 80-95% identical) are also intended to be encompassed by the present invention. For example, ranges of identity values using a combination of any of the above values recited as upper and/or lower limits are intended to be included. In another embodiment, the invention pertains to a full length C. glutamicum protein which is substantially homologous to an entire amino acid sequence of Appendix B.

[0105] Biologically active portions of an MCT protein include peptides comprising amino acid sequences derived from the amino acid sequence of an MCT protein, e.g., the an amino acid sequence shown in Appendix B or the amino acid sequence of a protein homologous to an MCT protein, which include fewer amino acids than a full length MCT protein or the full length protein which is homologous to an MCT protein, and exhibit at least one activity of an MCT protein. Typically, biologically active portions (peptides, e.g., peptides which are, for example, 5, 10, 15, 20, 30, 35, 36, 37, 38, 39, 40, 50, 100 or more amino acids in length) comprise a domain or motif with at least one activity of an MCT protein. Moreover, other biologically active portions, in which other regions of the protein are deleted, can be prepared by recombinant techniques and evaluated for one or more of the activities described herein. Preferably, the biologically active portions of an MCT protein include one or more selected domains/motifs or portions thereof having biological activity.

[0106] MCT proteins are preferably produced by recombinant DNA techniques. For example, a nucleic acid molecule encoding the protein is cloned into an expression vector (as described above), the expression vector is introduced into a host cell (as described above) and the MCT protein is expressed in the host cell. The MCT protein can then be isolated from the cells by an appropriate purification scheme using standard protein purification techniques. Alternative to recombinant expression, an MCT protein, polypeptide, or peptide can be synthesized chemically using standard peptide synthesis techniques. Moreover, native MCT protein can be isolated from cells (e.g., endothelial cells), for example using an anti-MCT antibody, which can be produced by standard techniques utilizing an MCT protein or fragment thereof of this invention.

[0107] The invention also provides MCT chimeric or fusion proteins. As used herein, an MCT “chimeric protein” or “fusion protein” comprises an MCT polypeptide operatively linked to a non-MCT polypeptide. An “MCT polypeptide” refers to a polypeptide having an amino acid sequence corresponding to an MCT protein, whereas a “non-MCT polypeptide” refers to a polypeptide having an amino acid sequence corresponding to a protein which is not substantially homologous to the MCT protein, e.g., a protein which is different from the MCT protein and which is derived from the same or a different organism. Within the fusion protein, the term “operatively linked” is intended to indicate that the MCT polypeptide and the non-MCT polypeptide are fused in-frame to each other. The non-MCT polypeptide can be fused to the N-terminus or C-terminus of the MCT polypeptide. For example, in one embodiment the fusion protein is a GST-MCT fusion protein in which the MCT sequences are fused to the C-terminus of the GST sequences. Such fusion proteins can facilitate the purification of recombinant MCT proteins. In another embodiment, the fusion protein is an MCT protein containing a heterologous signal sequence at its N-terminus. In certain host cells (e.g., mammalian host cells), expression and/or secretion of an MCT protein can be increased through use of a heterologous signal sequence.

[0108] Preferably, an MCT chimeric or fusion protein of the invention is produced by standard recombinant DNA techniques. For example, DNA fragments coding for the different polypeptide sequences are ligated together in-frame in accordance with conventional techniques, for example by employing blunt-ended or stagger-ended termini for ligation, restriction enzyme digestion to provide for appropriate termini, filling-in of cohesive ends as appropriate, alkaline phosphatase treatment to avoid undesirable joining, and enzymatic ligation. In another embodiment, the fusion gene can be synthesized by conventional techniques including automated DNA synthesizers. Alternatively, PCR amplification of gene fragments can be carried out using anchor primers which give rise to complementary overhangs between two consecutive gene fragments which can subsequently be annealed and reamplified to generate a chimeric gene sequence (see, for example, Current Protocols in Molecular Biology, eds. Ausubel et al. John Wiley & Sons: 1992). Moreover, many expression vectors are commercially available that already encode a fusion moiety (e.g., a GST polypeptide). An MCT-encoding nucleic acid can be cloned into such an expression vector such that the fusion moiety is linked in-frame to the MCT protein.

[0109] Homologues of the MCT protein can be generated by mutagenesis, e.g., discrete point mutation or truncation of the MCT protein. As used herein, the term “homologue” refers to a variant form of the MCT protein which acts as an agonist or antagonist of the activity of the MCT protein. An agonist of the MCT protein can retain substantially the same, or a subset, of the biological activities of the MCT protein. An antagonist of the MCT protein can inhibit one or more of the activities of the naturally occurring form of the MCT protein, by, for example, competitively binding to a downstream or upstream member of the cell membrane component metabolic cascade which includes the MCT protein, or by binding to an MCT protein which mediates transport of compounds across such membranes, thereby preventing translocation from taking place.

[0110] In an alternative embodiment, homologues of the MCT protein can be identified by screening combinatorial libraries of mutants, e.g., truncation mutants, of the MCT protein for MCT protein agonist or antagonist activity. In one embodiment, a variegated library of MCT variants is generated by combinatorial mutagenesis at the nucleic acid level and is encoded by a variegated gene library. A variegated library of MCT variants can be produced by, for example, enzymatically ligating a mixture of synthetic oligonucleotides into gene sequences such that a degenerate set of potential MCT sequences is expressible as individual polypeptides, or alternatively, as a set of larger fusion proteins (e.g., for phage display) containing the set of MCT sequences therein. There are a variety of methods which can be used to produce libraries of potential MCT homologues from a degenerate oligonucleotide sequence. Chemical synthesis of a degenerate gene sequence can be performed in an automatic DNA synthesizer, and the synthetic gene then ligated into an appropriate expression vector. Use of a degenerate set of genes allows for the provision, in one mixture, of all of the sequences encoding the desired set of potential MCT sequences. Methods for synthesizing degenerate oligonucleotides are known in the art (see, e.g., Narang, S. A. (1983) Tetrahedron 39: 3; Itakura et al. (1984) Annu. Rev. Biochem. 53: 323; Itakura et al. (1984) Science 198: 1056; Ike et al. (1983) Nucleic Acid Res. 11: 477.

[0111] In addition, libraries of fragments of the MCT protein coding can be used to generate a variegated population of MCT fragments for screening and subsequent selection of homologues of an MCT protein. In one embodiment, a library of coding sequence fragments can be generated by treating a double stranded PCR fragment of an MCT coding sequence with a nuclease under conditions wherein nicking occurs only about once per molecule, denaturing the double stranded DNA, renaturing the DNA to form double stranded DNA which can include sense/antisense pairs from different nicked products, removing single stranded portions from reformed duplexes by treatment with S1 nuclease, and ligating the resulting fragment library into an expression vector. By this method, an expression library can be derived which encodes N-terminal, C-terminal and internal fragments of various sizes of the MCT protein.

[0112] Several techniques are known in the art for screening gene products of combinatorial libraries made by point mutations or truncation, and for screening cDNA libraries for gene products having a selected property. Such techniques are adaptable for rapid screening of the gene libraries generated by the combinatorial mutagenesis of MCT homologues. The most widely used techniques, which are amenable to high through-put analysis, for screening large gene libraries typically include cloning the gene library into replicable expression vectors, transforming appropriate cells with the resulting library of vectors, and expressing the combinatorial genes under conditions in which detection of a desired activity facilitates isolation of the vector encoding the gene whose product was detected. Recursive ensemble mutagenesis (REM), a new technique which enhances the frequency of functional mutants in the libraries, can be used in combination with the screening assays to identify MCT homologues (Arkin and Yourvan (1992) PNAS 89: 7811-7815; Delgrave et al. (1993) Protein Engineering 6(3): 327-331).

[0113] In another embodiment, cell based assays can be exploited to analyze a variegated MCT library, using methods well known in the art.

D. Uses and Methods of the Invention

[0114] The nucleic acid molecules, proteins, protein homologues, fusion proteins, primers, vectors, and host cells described herein can be used in one or more of the following methods: identification of C. glutamicum and related organisms; mapping of genomes of organisms related to C. glutamicum; identification and localization of C. glutamicum sequences of interest; evolutionary studies; determination of MCT protein regions required for function; modulation of an MCT protein activity; modulation of the metabolism of one or more cell membrane components; modulation of the transmembrane transport of one or more compounds; and modulation of cellular production of a desired compound, such as a fine chemical.

[0115] The MCT nucleic acid molecules of the invention have a variety of uses. First, they may be used to identify an organism as being Corynebacterium glutamicum or a close relative thereof. Also, they may be used to identify the presence of C. glutamicum or a relative thereof in a mixed population of microorganisms. The invention provides the nucleic acid sequences of a number of C. glutamicum genes; by probing the extracted genomic DNA of a culture of a unique or mixed population of microorganisms under stringent conditions with a probe spanning a region of a C. glutamicum gene which is unique to this organism, one can ascertain whether this organism is present.

[0116] Although Corynebacterium glutamicum itself is nonpathogenic, it is related to pathogenic species, such as Corynebacterium diphtheriae. Corynebacterium diphtheriae is the causative agent of diphtheria, a rapidly developing, acute, febrile infection which involves both local and systemic pathology. In this disease, a local lesion develops in the upper respiratory tract and involves necrotic injury to epithelial cells; the bacilli secrete toxin which is disseminated through this lesion to distal susceptible tissues of the body. Degenerative changes brought about by the inhibition of protein synthesis in these tissues, which include heart, muscle, peripheral nerves, adrenals, kidneys, liver and spleen, result in the systemic pathology of the disease. Diphtheria continues to have high incidence in many parts of the world, including Africa, Asia, Eastern Europe and the independent states of the former Soviet Union. An ongoing epidemic of diphtheria in the latter two regions has resulted in at least 5,000 deaths since 1990. In one embodiment, the invention provides a method of identifying the presence or activity of Cornyebacterium diphtheriae in a subject. This method includes detection of one or more of the nucleic acid or amino acid sequences of the invention (e.g., the sequences set forth in Appendix A or Appendix B) in a subject, thereby detecting the presence or activity of Corynebacterium diphtheriae in the subject. C. glutamicum and C. diphtheriae are related bacteria, and many of the nucleic acid and protein molecules in C. glutamicum are homologous to C. diphtheriae nucleic acid and protein molecules, and can therefore be used to detect C. diphtheriae in a subject.

[0117] The nucleic acid and protein molecules of the invention may also serve as markers for specific regions of the genome. This has utility not only in the mapping of the genome, but also for functional studies of C. glutamicum proteins. For example, to identify the region of the genome to which a particular C. glutamicum DNA-binding protein binds, the C. glutamicum genome could be digested, and the fragments incubated with the DNA-binding protein. Those which bind the protein may be additionally probed with the nucleic acid molecules of the invention, preferably with readily detectable labels; binding of such a nucleic acid molecule to the genome fragment enables the localization of the fragment to the genome map of C. glutamicum, and, when performed multiple times with different enzymes, facilitates a rapid determination of the nucleic acid sequence to which the protein binds. Further, the nucleic acid molecules of the invention may be sufficiently homologous to the sequences of related species such that these nucleic acid molecules may serve as markers for the construction of a genomic map in related bacteria, such as Brevibacterium lactofermentum.

[0118] The MCT nucleic acid molecules of the invention are also useful for evolutionary and protein structural studies. The metabolic and transport processes in which the molecules of the invention participate are utilized by a wide variety of prokaryotic and eukaryotic cells; by comparing the sequences of the nucleic acid molecules of the present invention to those encoding similar enzymes from other organisms, the evolutionary relatedness of the organisms can be assessed. Similarly, such a comparison permits an assessment of which regions of the sequence are conserved and which are not, which may aid in determining those regions of the protein which are essential for the functioning of the enzyme. This type of determination is of value for protein engineering studies and may give an indication of what the protein can tolerate in terms of mutagenesis without losing function.

[0119] Manipulation of the MCT nucleic acid molecules of the invention may result in the production of MCT proteins having functional differences from the wild-type MCT proteins. These proteins may be improved in efficiency or activity, may be present in greater numbers in the cell than is usual, or may be decreased in efficiency or activity.

[0120] The invention provides methods for screening molecules which modulate the activity of an MCT protein, either by interacting with the protein itself or a substrate or binding partner of the MCT protein, or by modulating the transcription or translation of an MCT nucleic acid molecule of the invention. In such methods, a microorganism expressing one or more MCT proteins of the invention is contacted with one or more test compounds, and the effect of each test compound on the activity or level of expression of the MCT protein is assessed.

[0121] There are a number of mechanisms by which the alteration of an MCT protein of the invention may directly affect the yield, production, and/or efficiency of production of a fine chemical from a C. glutamicum strain incorporating such an altered protein. Recovery of fine chemical compounds from large-scale cultures of C. glutamicum is significantly improved if C. glutamicum secretes the desired compounds, since such compounds may be readily purified from the culture medium (as opposed to extracted from the mass of C. glutamicum cells). By either increasing the number or the activity of transporter molecules which export fine chemicals from the cell, it may be possible to increase the amount of the produced fine chemical which is present in the extracellular medium, thus permitting greater ease of harvesting and purification. Conversely, in order to efficiently overproduce one or more fine chemicals, increased amounts of the cofactors, precursor molecules, and intermediate compounds for the appropriate biosynthetic pathways are required. Therefore, by increasing the number and/or activity of transporter proteins involved in the import of nutrients, such as carbon sources (i.e., sugars), nitrogen sources (i.e., amino acids, ammonium salts), phosphate, and sulfur, it may be possible to improve the production of a fine chemical, due to the removal of any nutrient supply limitations on the biosynthetic process. Further, fatty acids and lipids are themselves desirable fine chemicals, so by optimizing the activity or increasing the number of one or more MCT proteins of the invention which participate in the biosynthesis of these compounds, or by impairing the activity of one or more MCT proteins which are involved in the degradation of these compounds, it may be possible to increase the yield, production, and/or efficiency of production of fatty acid and lipid molecules from C. glutamicum.

[0122] The engineering of one or more MCT genes of the invention may also result in MCT proteins having altered activities which indirectly impact the production of one or more desired fine chemicals from C. glutamicum. For example, the normal biochemical processes of metabolism result in the production of a variety of waste products (e.g., hydrogen peroxide and other reactive oxygen species) which may actively interfere with these same metabolic processes (for example, peroxynitrite is known to nitrate tyrosine side chains, thereby inactivating some enzymes having tyrosine in the active site (Groves, J. T. (1999) Curr. Opin. Chem. Biol. 3(2): 226-235). While these waste products are typically excreted, the C. glutamicum strains utilized for large-scale fermentative production are optimized for the overproduction of one or more fine chemicals, and thus may produce more waste products than is typical for a wild-type C. glutamicum. By optimizing the activity of one or more MCT proteins of the invention which are involved in the export of waste molecules, it may be possible to improve the viability of the cell and to maintain efficient metabolic activity. Also, the presence of high intracellular levels of the desired fine chemical may actually be toxic to the cell, so by increasing the ability of the cell to secrete these compounds, one may improve the viability of the cell.

[0123] Further, the MCT proteins of the invention may be manipulated such that the relative amounts of various lipid and fatty acid molecules produced are altered. This may have a profound effect on the lipid composition of the membrane of the cell. Since each type of lipid has different physical properties, an alteration in the lipid composition of a membrane may significantly alter membrane fluidity. Changes in membrane fluidity can impact the transport of molecules across the membrane, which, as previously explicated, may modify the export of waste products or the produced fine chemical or the import of necessary nutrients. Such membrane fluidity changes may also profoundly affect the integrity of the cell; cells with relatively weaker membranes are more vulnerable in the large-scale fermentor environment to mechanical stresses which may damage or kill the cell. By manipulating MCT proteins involved in the production of fatty acids and lipids for membrane construction such that the resulting membrane has a membrane composition more amenable to the environmental conditions extant in the cultures utilized to produce fine chemicals, a greater proportion of the C. glutamicum cells should survive and multiply. Greater numbers of C. glutamicum cells in a culture should translate into greater yields, production, or efficiency of production of the fine chemical from the culture.

[0124] The aforementioned mutagenesis strategies for MCT proteins to result in increased yields of a fine chemical from C. glutamicum are not meant to be limiting; variations on these strategies will be readily apparent to one of ordinary skill in the art. Using such strategies, and incorporating the mechanisms disclosed herein, the nucleic acid and protein molecules of the invention may be utilized to generate C. glutamicum or related strains of bacteria expressing mutated MCT nucleic acid and protein molecules such that the yield, production, and/or efficiency of production of a desired compound is improved. This desired compound may be any natural product of C. glutamicum, which includes the final products of biosynthesis pathways and intermediates of naturally-occurring metabolic pathways, as well as molecules which do not naturally occur in the metabolism of C. glutamicum, but which are produced by a C. glutamicum strain of the invention.

[0125] This invention is further illustrated by the following examples which should not be construed as limiting. The contents of all references, patent applications, patents, published patent applications, Tables, Appendices, and the sequence listing cited throughout this application are hereby incorporated by reference.

### EXEMPLIFICATION

### Example 1

### Preparation of Total Genomic DNA of Corynebacterium glutamicum ATCC 13032

[0126] A culture of Corynebacterium glutamicum (ATCC 13032) was grown overnight at 30° C. with vigorous shaking in BHI medium (Difco). The cells were harvested by centrifugation, the supernatant was discarded and the cells were resuspended in 5 ml buffer-I (5% of the original volume of the culture—all indicated volumes have been calculated for 100 ml of culture volume). Composition of buffer-I: 140.34 g/l sucrose, 2.46 g/l MgSO₄×7H₂O, 10 ml/l KH₂PO₄ solution (100 g/l, adjusted to pH 6.7 with KOH), 50 ml/l M12 concentrate (10 g/l (NH₄)₂SO₄, 1 g/l NaCl, 2 g/l MgSO₄×7H₂O, 0.2 g/l CaCl₂, 0.5 g/l yeast extract (Difco), 10 ml/l trace-elements-mix (200 mg/l FeSO₄×H₂O, 10 mg/l ZnSO₄×7H₂O, 3 mg/l MnCl₂×4H₂O, 30 mg/l H₃BO₃ 20 mg/l CoCl₂×6H₂O, 1 mg/l NiCl₂×6H₂O, 3 mg/l Na₂MoO₄×2H₂O, 500 mg/l complexing agent (EDTA or critic acid), 100 ml/l vitamins-mix (0.2 mg/l biotin, 0.2 mg/l folic acid, 20 mg/l p-amino benzoic acid, 20 mg/l riboflavin, 40 mg/l ca-panthothenate, 140 mg/l nicotinic acid, 40 mg/l pyridoxole hydrochloride, 200 mg/l myo-inositol). Lysozyme was added to the suspension to a final concentration of 2.5 mg/ml. After an approximately 4 h incubation at 37° C., the cell wall was degraded and the resulting protoplasts are harvested by centrifugation. The pellet was washed once with 5 ml buffer-I and once with 5 ml TE-buffer (10 mM Tris-HCl, 1 mM EDTA, pH 8). The pellet was resuspended in 4 ml TE-buffer and 0.5 ml SDS solution (10%) and 0.5 ml NaCl solution (5 M) are added. After adding of proteinase K to a final concentration of 200 μg/ml, the suspension is incubated for ca. 18 h at 37° C. The DNA was purified by extraction with phenol, phenol-chloroform-isoamylalcohol and chloroform-isoamylalcohol using standard procedures. Then, the DNA was precipitated by adding 1/50 volume of 3 M sodium acetate and 2 volumes of ethanol, followed by a 30 min incubation at −20° C. and a 30 min centrifugation at 12,000 rpm in a high speed centrifuge using a SS34 rotor (Sorvall). The DNA was dissolved in 1 ml TE-buffer containing 20 μg/ml RNaseA and dialysed at 4° C. against 1000 ml TE-buffer for at least 3 hours. During this time, the buffer was exchanged 3 times. To aliquots of 0.4 ml of the dialysed DNA solution, 0.4 ml of 2 M LiCl and 0.8 ml of ethanol are added. After a 30 min incubation at −20° C., the DNA was collected by centrifugation (13,000 rpm, Biofuge Fresco, Heraeus, Hanau, Germany). The DNA pellet was dissolved in TE-buffer. DNA prepared by this procedure could be used for all purposes, including southern blotting or construction of genomic libraries.

### Example 2

### Construction of Genomic Libraries in Escherichia coli of Corynebacterium glutamicum ATCC13032

[0127] Using DNA prepared as described in Example 1, cosmid and plasmid libraries were constructed according to known and well established methods (see e.g., Sambrook, J. et al. (1989) “Molecular Cloning: A Laboratory Manual”, Cold Spring Harbor Laboratory Press, or Ausubel, F. M. et al. (1994) “Current Protocols in Molecular Biology”, John Wiley & Sons.)

[0128] Any plasmid or cosmid could be used. Of particular use were the plasmids pBR322 (Sutcliffe, J. G. (1979) Proc. Natl. Acad. Sci. USA, 75: 3737-3741); pACYC177 (Change & Cohen (1978) J. Bacteriol 134: 1141-1156), plasmids of the pBS series (pBSSK+, pBSSK− and others; Stratagene, LaJolla, USA), or cosmids as SuperCos1 (Stratagene, LaJolla, USA) or Lorist6 (Gibson, T. J., Rosenthal A. and Waterson, R. H. (1987) Gene 53: 283-286. Gene libraries specifically for use in C. glutamicum may be constructed using plasmid pSL109 (Lee, H.-S. and A. J. Sinskey (1994) J. Microbiol. Biotechnol. 4: 256-263).

### Example 3

### DNA Sequencing and Computational Functional Analysis

[0129] Genomic libraries as described in Example 2 were used for DNA sequencing according to standard methods, in particular by the chain termination method using ABI377 sequencing machines (see e.g., Fleischman, R. D. et al. (1995) “Whole-genome Random Sequencing and Assembly of Haemophilus Influenzae Rd., Science, 269: 496-512). Sequencing primers with the following nucleotide sequences were used: 5′-GGAAACAGTATGACCATG-3′ or 5′-GTAAAACGACGGCCAGT-3′.

### Example 4

### In Vivo Mutagenesis

[0130] In vivo mutagenesis of Corynebacterium glutamicum can be performed by passage of plasmid (or other vector) DNA through E. coli or other microorganisms (e.g. Bacillus spp. or yeasts such as Saccharomyces cerevisiae) which are impaired in their capabilities to maintain the integrity of their genetic information. Typical mutator strains have mutations in the genes for the DNA repair system (e.g., mutHLS, mutD, mutT, etc.; for reference, see Rupp, W. D. (1996) DNA repair mechanisms, in: Escherichia coli and Salmonella, p. 2277-2294, ASM: Washington.) Such strains are well known to those of ordinary skill in the art. The use of such strains is illustrated, for example, in Greener, A. and Callahan, M. (1994) Strategies 7: 32-34.

### Example 5

### DNA Transfer Between Escherichia coli and Corynebacterium glutamicum

[0131] Several Corynebacterium and Brevibacterium species contain endogenous plasmids (as e.g., pHM1519 or pBL1) which replicate autonomously (for review see, e.g., Martin, J. F. et al. (1987) Biotechnology, 5: 137-146). Shuttle vectors for Escherichia coli and Corynebacterium glutamicum can be readily constructed by using standard vectors for E. coli (Sambrook, J. et al. (1989), “Molecular Cloning: A Laboratory Manual”, Cold Spring Harbor Laboratory Press or Ausubel, F. M. et al. (1994) “Current Protocols in Molecular Biology”, John Wiley & Sons) to which a origin or replication for and a suitable marker from Corynebacterium glutamicum is added. Such origins of replication are preferably taken from endogenous plasmids isolated from Corynebacterium and Brevibacterium species. Of particular use as transformation markers for these species are genes for kanamycin resistance (such as those derived from the Tn5 or Tn903 transposons) or chloramphenicol (Winnacker, E. L. (1987) “From Genes to Clones—Introduction to Gene Technology, VCH, Weinheim). There are numerous examples in the literature of the construction of a wide variety of shuttle vectors which replicate in both E. coli and C. glutamicum, and which can be used for several purposes, including gene over-expression (for reference, see e.g., Yoshihama, M. et al. (1985) J. Bacteriol. 162: 591-597, Martin J. F. et al. (1987) Biotechnology, 5: 137-146 and Eikmanns, B. J. et al. (1991) Gene, 102: 93-98).

[0132] Using standard methods, it is possible to clone a gene of interest into one of the shuttle vectors described above and to introduce such a hybrid vectors into strains of Corynebacterium glutamicum. Transformation of C. glutamicum can be achieved by protoplast transformation (Kastsumata, R. et al. (1984) J. Bacteriol. 159306-311), electroporation (Liebl, E. et al. (1989) FEMS Microbiol. Letters, 53: 399-303) and in cases where special vectors are used, also by conjugation (as described e.g. in Schäfer, A et al. (1990) J. Bacteriol. 172: 1663-1666). It is also possible to transfer the shuttle vectors for C. glutamicum to E. coli by preparing plasmid DNA from C. glutamicum (using standard methods well-known in the art) and transforming it into E. coli. This transformation step can be performed using standard methods, but it is advantageous to use an Mcr-deficient E. coli strain, such as NM522 (Gough & Murray (1983) J. Mol. Biol. 166: 1-19).

[0133] Genes may be overexpressed in C. glutamicum strains using plasmids which comprise pCG1 (U.S. Pat. No. 4,617,267) or fragments thereof, and optionally the gene for kanamycin resistance from TN903 (Grindley, N. D. and Joyce, C. M. (1980) Proc. Natl. Acad. Sci. USA 77(12): 7176-7180). In addition, genes may be overexpressed in C. glutamicum strains using plasmid pSL109 (Lee, H.-S. and A. J. Sinskey (1994) J. Microbiol. Biotechnol. 4: 256-263).

[0134] Aside from the use of replicative plasmids, gene overexpression can also be achieved by integration into the genome. Genomic integration in C. glutamicum or other Corynebacterium or Brevibacterium species may be accomplished by well-known methods, such as homologous recombination with genomic region(s), restriction endonuclease mediated integration (REMI) (see, e.g., DE Patent 19823834), or through the use of transposons. It is also possible to modulate the activity of a gene of interest by modifying the regulatory regions (e.g., a promoter, a repressor, and/or an enhancer) by sequence modification, insertion, or deletion using site-directed methods (such as homologous recombination) or methods based on random events (such as transposon mutagenesis or REMI). Nucleic acid sequences which function as transcriptional terminators may also be inserted 3′ to the coding region of one or more genes of the invention; such terminators are well-known in the art and are described, for example, in Winnacker, E. L. (1987) From Genes to Clones—Introduction to Gene Technology. VCH: Weinheim.

### Example 6

### Assessment of the Expression of the Mutant Protein

[0135] Observations of the activity of a mutated protein in a transformed host cell rely on the fact that the mutant protein is expressed in a similar fashion and in a similar quantity to that of the wild-type protein. A useful method to ascertain the level of transcription of the mutant gene (an indicator of the amount of mRNA available for translation to the gene product) is to perform a Northern blot (for reference see, for example, Ausubel et al. (1988) Current Protocols in Molecular Biology, Wiley: New York), in which a primer designed to bind to the gene of interest is labeled with a detectable tag (usually radioactive or chemiluminescent), such that when the total RNA of a culture of the organism is extracted, run on gel, transferred to a stable matrix and incubated with this probe, the binding and quantity of binding of the probe indicates the presence and also the quantity of mRNA for this gene. This information is evidence of the degree of transcription of the mutant gene. Total cellular RNA can be prepared from Corynebacterium glutamicum by several methods, all well-known in the art, such as that described in Bormann, E. R. et al. (1992) Mol. Microbiol. 6: 317-326.

[0136] To assess the presence or relative quantity of protein translated from this mRNA, standard techniques, such as a Western blot, may be employed (see, for example, Ausubel et al. (1988) Current Protocols in Molecular Biology, Wiley: New York). In this process, total cellular proteins are extracted, separated by gel electrophoresis, transferred to a matrix such as nitrocellulose, and incubated with a probe, such as an antibody, which specifically binds to the desired protein. This probe is generally tagged with a chemiluminescent or colorimetric label which may be readily detected. The presence and quantity of label observed indicates the presence and quantity of the desired mutant protein present in the cell.

### Example 7

### Growth of Genetically Modified Corynebacterium glutamicum—Media and Culture Conditions

[0137] Genetically modified Corynebacteria are cultured in synthetic or natural growth media. A number of different growth media for Corynebacteria are both well-known and readily available (Lieb et al. (1989) Appl. Microbiol. Biotechnol., 32: 205-210; von der Osten et al. (1998) Biotechnology Letters, 11: 11-16; Patent DE 4,120,867; Liebl (1992) “The Genus Corynebacterium, in: The Procaryotes, Volume II, Balows, A. et al., eds. Springer-Verlag). These media consist of one or more carbon sources, nitrogen sources, inorganic salts, vitamins and trace elements. Preferred carbon sources are sugars, such as mono-, di-, or polysaccharides. For example, glucose, fructose, mannose, galactose, ribose, sorbose, ribulose, lactose, maltose, sucrose, raffinose, starch or cellulose serve as very good carbon sources. It is also possible to supply sugar to the media via complex compounds such as molasses or other by-products from sugar refinement. It can also be advantageous to supply mixtures of different carbon sources. Other possible carbon sources are alcohols and organic acids, such as methanol, ethanol, acetic acid or lactic acid. Nitrogen sources are usually organic or inorganic nitrogen compounds, or materials which contain these compounds. Exemplary nitrogen sources include ammonia gas or ammonia salts, such as NH₄Cl or (NH₄)₂SO₄, NH₄OH, nitrates, urea, amino acids or complex nitrogen sources like corn steep liquor, soy bean flour, soy bean protein, yeast extract, meat extract and others.

[0138] Inorganic salt compounds which may be included in the media include the chloride-, phosphorous- or sulfate-salts of calcium, magnesium, sodium, cobalt, molybdenum, potassium, manganese, zinc, copper and iron. Chelating compounds can be added to the medium to keep the metal ions in solution. Particularly useful chelating compounds include dihydroxyphenols, like catechol or protocatechuate, or organic acids, such as citric acid. It is typical for the media to also contain other growth factors, such as vitamins or growth promoters, examples of which include biotin, riboflavin, thiamin, folic acid, nicotinic acid, pantothenate and pyridoxin. Growth factors and salts frequently originate from complex media components such as yeast extract, molasses, corn steep liquor and others. The exact composition of the media compounds depends strongly on the immediate experiment and is individually decided for each specific case. Information about media optimization is available in the textbook “Applied Microbiol. Physiology, A Practical Approach (eds. P. M. Rhodes, P. F. Stanbury, IRL Press (1997) pp. 53-73, ISBN 0 19 963577 3). It is also possible to select growth media from commercial suppliers, like standard 1 (Merck) or BHI (grain heart infusion, DIFCO) or others.

[0139] All medium components are sterilized, either by heat (20 minutes at 1.5 bar and 121° C.) or by sterile filtration. The components can either be sterilized together or, if necessary, separately. All media components can be present at the beginning of growth, or they can optionally be added continuously or batchwise.

[0140] Culture conditions are defined separately for each experiment. The temperature should be in a range between 15° C. and 45° C. The temperature can be kept constant or can be altered during the experiment. The pH of the medium should be in the range of 5 to 8.5, preferably around 7.0, and can be maintained by the addition of buffers to the media. An exemplary buffer for this purpose is a potassium phosphate buffer. Synthetic buffers such as MOPS, HEPES, ACES and others can alternatively or simultaneously be used. It is also possible to maintain a constant culture pH through the addition of NaOH or NH₄OH during growth. If complex medium components such as yeast extract are utilized, the necessity for additional buffers may be reduced, due to the fact that many complex compounds have high buffer capacities. If a fermentor is utilized for culturing the micro-organisms, the pH can also be controlled using gaseous ammonia.

[0141] The incubation time is usually in a range from several hours to several days. This time is selected in order to permit the maximal amount of product to accumulate in the broth. The disclosed growth experiments can be carried out in a variety of vessels, such as microtiter plates, glass tubes, glass flasks or glass or metal fermentors of different sizes. For screening a large number of clones, the microorganisms should be cultured in microtiter plates, glass tubes or shake flasks, either with or without baffles. Preferably 100 ml shake flasks are used, filled with 10% (by volume) of the required growth medium. The flasks should be shaken on a rotary shaker (amplitude 25 mm) using a speed-range of 100-300 rpm. Evaporation losses can be diminished by the maintenance of a humid atmosphere; alternatively, a mathematical correction for evaporation losses should be performed.

[0142] If genetically modified clones are tested, an unmodified control clone or a control clone containing the basic plasmid without any insert should also be tested. The medium is inoculated to an OD₆₀₀ of 0.5-1.5 using cells grown on agar plates, such as CM plates (10 g/l glucose, 2.5 g/l NaCl, 2 g/l urea, 10 g/l polypeptone, 5 g/l yeast extract, 5 g/l meat extract, 22 g/l NaCl, 2 g/l urea, 10 g/l polypeptone, 5 g/l yeast extract, 5 g/l meat extract, 22 g/l agar, pH 6.8 with 2M NaOH) that had been incubated at 30° C. Inoculation of the media is accomplished by either introduction of a saline suspension of C. glutamicum cells from CM plates or addition of a liquid preculture of this bacterium.

### Example 8

### In Vitro Analysis of the Function of Mutant Proteins

[0143] The determination of activities and kinetic parameters of enzymes is well established in the art. Experiments to determine the activity of any given altered enzyme must be tailored to the specific activity of the wild-type enzyme, which is well within the ability of one of ordinary skill in the art. Overviews about enzymes in general, as well as specific details concerning structure, kinetics, principles, methods, applications and examples for the determination of many enzyme activities may be found, for example, in the following references: Dixon, M., and Webb, E. C., (1979) Enzymes. Longmans: London; Fersht, (1985) Enzyme Structure and Mechanism. Freeman: New York; Walsh, (1979) Enzymatic Reaction Mechanisms. Freeman: San Francisco; Price, N.C., Stevens, L. (1982) Fundamentals of Enzymology. Oxford Univ. Press: Oxford; Boyer, P. D., ed. (1983) The Enzymes, 3^{rd} ed. Academic Press: New York; Bisswanger, H., (1994) Enzymkinetik, 2^{nd} ed. VCH: Weinheim (ISBN 3527300325); Bergmeyer, H. U., Bergmeyer, J., Graβl, M., eds. (1983-1986) Methods of Enzymatic Analysis, 3^{rd} ed., vol. I-XII, Verlag Chemie: Weinheim; and Ullmann's Encyclopedia of Industrial Chemistry (1987) vol. A9, “Enzymes”. VCH: Weinheim, p. 352-363.

[0144] The activity of proteins which bind to DNA can be measured by several well-established methods, such as DNA band-shift assays (also called gel retardation assays). The effect of such proteins on the expression of other molecules can be measured using reporter gene assays (such as that described in Kolmar, H. et al. (1995) EMBO J. 14: 3895-3904 and references cited therein). Reporter gene test systems are well known and established for applications in both pro- and eukaryotic cells, using enzymes such as beta-galactosidase, green fluorescent protein, and several others.

[0145] The determination of activity of membrane-transport proteins can be performed according to techniques such as those described in Gennis, R. B. (1989) “Pores, Channels and Transporters”, in Biomembranes, Molecular Structure and Function, Springer: Heidelberg, p. 85-137; 199-234; and 270-322.

### Example 9

### Analysis of Impact of Mutant Protein on the Production of the Desired Product

[0146] The effect of the genetic modification in C. glutamicum on production of a desired compound (such as an amino acid) can be assessed by growing the modified microorganism under suitable conditions (such as those described above) and analyzing the medium and/or the cellular component for increased production of the desired product (i.e., an amino acid). Such analysis techniques are well known to one of ordinary skill in the art, and include spectroscopy, thin layer chromatography, staining methods of various kinds, enzymatic and microbiological methods, and analytical chromatography such as high performance liquid chromatography (see, for example, Ullman, Encyclopedia of Industrial Chemistry, vol. A2, p. 89-90 and p. 443-613, VCH: Weinheim (1985); Fallon, A. et al., (1987) “Applications of HPLC in Biochemistry” in: Laboratory Techniques in Biochemistry and Molecular Biology, vol. 17; Rehm et al. (1993) Biotechnology, vol. 3, Chapter III: “Product recovery and purification”, page 469-714, VCH: Weinheim; Belter, P. A. et al. (1988) Bioseparations: downstream processing for biotechnology, John Wiley and Sons; Kennedy, J. F. and Cabral, J. M. S. (1992) Recovery processes for biological materials, John Wiley and Sons; Shaeiwitz, J. A. and Henry, J. D. (1988) Biochemical separations, in: Ulmann's Encyclopedia of Industrial Chemistry, vol. B3, Chapter 11, page 1-27, VCH: Weinheim; and Dechow, F. J. (1989) Separation and purification techniques in biotechnology, Noyes Publications.)

[0147] In addition to the measurement of the final product of fermentation, it is also possible to analyze other components of the metabolic pathways utilized for the production of the desired compound, such as intermediates and side-products, to determine the overall efficiency of production of the compound. Analysis methods include measurements of nutrient levels in the medium (e.g., sugars, hydrocarbons, nitrogen sources, phosphate, and other ions), measurements of biomass composition and growth, analysis of the production of common metabolites of biosynthetic pathways, and measurement of gasses produced during fermentation. Standard methods for these measurements are outlined in Applied Microbial Physiology, A Practical Approach, P. M. Rhodes and P. F. Stanbury, eds., IRL Press, p. 103-129; 131-163; and 165-192 (ISBN: 0199635773) and references cited therein.

### Example 10

### Purification of the Desired Product from C. glutamicum Culture

[0148] Recovery of the desired product from the C. glutamicum cells or supernatant of the above-described culture can be performed by various methods well known in the art. If the desired product is not secreted from the cells, the cells can be harvested from the culture by low-speed centrifugation, the cells can be lysed by standard techniques, such as mechanical force or sonication. The cellular debris is removed by centrifugation, and the supernatant fraction containing the soluble proteins is retained for further purification of the desired compound. If the product is secreted from the C. glutamicum cells, then the cells are removed from the culture by low-speed centrifugation, and the supernate fraction is retained for further purification.

[0149] The supernatant fraction from either purification method is subjected to chromatography with a suitable resin, in which the desired molecule is either retained on a chromatography resin while many of the impurities in the sample are not, or where the impurities are retained by the resin while the sample is not. Such chromatography steps may be repeated as necessary, using the same or different chromatography resins. One of ordinary skill in the art would be well-versed in the selection of appropriate chromatography resins and in their most efficacious application for a particular molecule to be purified. The purified product may be concentrated by filtration or ultrafiltration, and stored at a temperature at which the stability of the product is maximized.

[0150] There are a wide array of purification methods known to the art and the preceding method of purification is not meant to be limiting. Such purification techniques are described, for example, in Bailey, J. E. & Ollis, D. F. Biochemical Engineering Fundamentals, McGraw-Hill: New York (1986).

[0151] The identity and purity of the isolated compounds may be assessed by techniques standard in the art. These include high-performance liquid chromatography (HPLC), spectroscopic methods, staining methods, thin layer chromatography, NIRS, enzymatic assay, or microbiologically. Such analysis methods are reviewed in: Patek et al. (1994) Appl. Environ. Microbiol. 60: 133-140; Malakhova et al. (1996) Biotekhnologiya 11: 27-32; and Schmidt et al. (1998) Bioprocess Engineer. 19: 67-70. Ulmann's Encyclopedia of Industrial Chemistry, (1996) vol. A27, VCH: Weinheim, p. 89-90, p. 521-540, p. 540-547, p. 559-566, 575-581 and p. 581-587; Michal, G. (1999) Biochemical Pathways: An Atlas of Biochemistry and Molecular Biology, John Wiley and Sons; Fallon, A. et al. (1987) Applications of HPLC in Biochemistry in: Laboratory Techniques in Biochemistry and Molecular Biology, vol. 17.

### Example 11

### Analysis of the Gene Sequences of the Invention

[0152] The comparison of sequences and determination of percent homology between two sequences are art-known techniques, and can be accomplished using a mathematical algorithm, such as the algorithm of Karlin and Altschul (1990) Proc. Natl. Acad. Sci. USA 87: 2264-68, modified as in Karlin and Altschul (1993) Proc. Natl. Acad. Sci. USA 90: 5873-77. Such an algorithm is incorporated into the NBLAST and XBLAST programs (version 2.0) of Altschul, et al. (1990) J. Mol. Biol. 215: 403-10. BLAST nucleotide searches can be performed with the NBLAST program, score=100, wordlength=12 to obtain nucleotide sequences homologous to MCT nucleic acid molecules of the invention. BLAST protein searches can be performed with the XBLAST program, score=50, wordlength=3 to obtain amino acid sequences homologous to MCT protein molecules of the invention. To obtain gapped alignments for comparison purposes, Gapped BLAST can be utilized as described in Altschul et al., (1997) Nucleic Acids Res. 25(17): 3389-3402. When utilizing BLAST and Gapped BLAST programs, one of ordinary skill in the art will know how to optimize the parameters of the program (e.g., XBLAST and NBLAST) for the specific sequence being analyzed.

[0153] Another example of a mathematical algorithm utilized for the comparison of sequences is the algorithm of Meyers and Miller ((1988) Comput. Appl. Biosci. 4: 11-17). Such an algorithm is incorporated into the ALIGN program (version 2.0) which is part of the GCG sequence alignment software package. When utilizing the ALIGN program for comparing amino acid sequences, a PAM120 weight residue table, a gap length penalty of 12, and a gap penalty of 4 can be used. Additional algorithms for sequence analysis are known in the art, and include ADVANCE and ADAM. described in Torelli and Robotti (1994) Comput. Appl. Biosci. 10: 3-5; and FASTA, described in Pearson and Lipman (1988) P.N.A.S. 85: 2444-8.

[0154] The percent homology between two amino acid sequences can also be accomplished using the GAP program in the GCG software package (available at http://www.gcg.com), using either a Blosum 62 matrix or a PAM250 matrix, and a gap weight of 12, 10, 8, 6, or 4 and a length weight of 2, 3, or 4. The percent homology between two nucleic acid sequences can be accomplished using the GAP program in the GCG software package, using standard parameters, such as a gap weight of 50 and a length weight of 3.

[0155] A comparative analysis of the gene sequences of the invention with those present in Genbank has been performed using techniques known in the art (see, e.g., Bexevanis and Ouellette, eds. (1998) Bioinformatics: A Practical Guide to the Analysis of Genes and Proteins. John Wiley and Sons: New York). The gene sequences of the invention were compared to genes present in Genbank in a three-step process. In a first step, a BLASTN analysis (e.g., a local alignment analysis) was performed for each of the sequences of the invention against the nucleotide sequences present in Genbank, and the top 500 hits were retained for further analysis. A subsequent FASTA search (e.g., a combined local and global alignment analysis, in which limited regions of the sequences are aligned) was performed on these 500 hits. Each gene sequence of the invention was subsequently globally aligned to each of the top three FASTA hits, using the GAP program in the GCG software package (using standard parameters). In order to obtain correct results, the length of the sequences extracted from Genbank were adjusted to the length of the query sequences by methods well-known in the art. The results of this analysis are set forth in Table 4. The resulting data is identical to that which would have been obtained had a GAP (global) analysis alone been performed on each of the genes of the invention in comparison with each of the references in Genbank, but required significantly reduced computational time as compared to such a database-wide GAP (global) analysis. Sequences of the invention for which no alignments above the cutoff values were obtained are indicated on Table 4 by the absence of alignment information. It will further be understood by one of ordinary skill in the art that the GAP alignment homology percentages set forth in Table 4 under the heading “% homology (GAP)” are listed in the European numerical format, wherein a ‘,’ represents a decimal point. For example, a value of “40,345” in this column represents “40.345%”.

### Example 12

### Construction and Operation of DNA Microarrays

[0156] The sequences of the invention may additionally be used in the construction and application of DNA microarrays (the design, methodology, and uses of DNA arrays are well known in the art, and are described, for example, in Schena, M. et al. (1995) Science 270: 467-470; Wodicka, L. et al. (1997) Nature Biotechnology 15: 1359-1367; DeSaizieu, A. et al. (1998) Nature Biotechnology 16: 45-48; and DeRisi, J. L. et al. (1997) Science 278: 680-686).

[0157] DNA microarrays are solid or flexible supports consisting of nitrocellulose, nylon, glass, silicone, or other materials. Nucleic acid molecules may be attached to the surface in an ordered manner. After appropriate labeling, other nucleic acids or nucleic acid mixtures can be hybridized to the immobilized nucleic acid molecules, and the label may be used to monitor and measure the individual signal intensities of the hybridized molecules at defined regions. This methodology allows the simultaneous quantification of the relative or absolute amount of all or selected nucleic acids in the applied nucleic acid sample or mixture. DNA microarrays, therefore, permit an analysis of the expression of multiple (as many as 6800 or more) nucleic acids in parallel (see, e.g., Schena, M. (1996) BioEssays 18(5): 427-431).

[0158] The sequences of the invention may be used to design oligonucleotide primers which are able to amplify defined regions of one or more C. glutamicum genes by a nucleic acid amplification reaction such as the polymerase chain reaction. The choice and design of the 5′ or 3′ oligonucleotide primers or of appropriate linkers allows the covalent attachment of the resulting PCR products to the surface of a support medium described above (and also described, for example, Schena, M. et al. (1995) Science 270: 467-470).

[0159] Nucleic acid microarrays may also be constructed by in situ oligonucleotide synthesis as described by Wodicka, L. et al. (1997) Nature Biotechnology 15: 1359-1367. By photolithographic methods, precisely defined regions of the matrix are exposed to light. Protective groups which are photolabile are thereby activated and undergo nucleotide addition, whereas regions that are masked from light do not undergo any modification. Subsequent cycles of protection and light activation permit the synthesis of different oligonucleotides at defined positions. Small, defined regions of the genes of the invention may be synthesized on microarrays by solid phase oligonucleotide synthesis.

[0160] The nucleic acid molecules of the invention present in a sample or mixture of nucleotides may be hybridized to the microarrays. These nucleic acid molecules can be labeled according to standard methods. In brief, nucleic acid molecules (e.g., mRNA molecules or DNA molecules) are labeled by the incorporation of isotopically or fluorescently labeled nucleotides, e.g., during reverse transcription or DNA synthesis. Hybridization of labeled nucleic acids to microarrays is described (e.g., in Schena, M. et al. (1995) supra; Wodicka, L. et al. (1997), supra; and DeSaizieu A. et al. (1998), supra). The detection and quantification of the hybridized molecule are tailored to the specific incorporated label. Radioactive labels can be detected, for example, as described in Schena, M. et al. (1995) supra) and fluorescent labels may be detected, for example, by the method of Shalon et al. (1996) Genome Research 6: 639-645).

[0161] The application of the sequences of the invention to DNA microarray technology, as described above, permits comparative analyses of different strains of C. glutamicum or other Corynebacteria. For example, studies of inter-strain variations based on individual transcript profiles and the identification of genes that are important for specific and/or desired strain properties such as pathogenicity, productivity and stress tolerance are facilitated by nucleic acid array methodologies. Also, comparisons of the profile of expression of genes of the invention during the course of a fermentation reaction are possible using nucleic acid array technology.

### Example 13

### Analysis of the Dynamics of Cellular Protein Populations (Proteomics)

[0162] The genes, compositions, and methods of the invention may be applied to study the interactions and dynamics of populations of proteins, termed ‘proteomics’. Protein populations of interest include, but are not limited to, the total protein population of C. glutamicum (e.g., in comparison with the protein populations of other organisms), those proteins which are active under specific environmental or metabolic conditions (e.g., during fermentation, at high or low temperature, or at high or low pH), or those proteins which are active during specific phases of growth and development.

[0163] Protein populations can be analyzed by various well-known techniques, such as gel electrophoresis. Cellular proteins may be obtained, for example, by lysis or extraction, and may be separated from one another using a variety of electrophoretic techniques. Sodium dodecyl sulfate polyacrylamide gel electrophoresis (SDS-PAGE) separates proteins largely on the basis of their molecular weight. Isoelectric focusing polyacrylamide gel electrophoresis (IEF-PAGE) separates proteins by their isoelectric point (which reflects not only the amino acid sequence but also posttranslational modifications of the protein). Another, more preferred method of protein analysis is the consecutive combination of both IEF-PAGE and SDS-PAGE, known as 2-D-gel electrophoresis (described, for example, in Hermann et al. (1998) Electrophoresis 19: 3217-3221; Fountoulakis et al. (1998) Electrophoresis 19: 1193-1202; Langen et al. (1997) Electrophoresis 18: 1184-1192; Antelmann et al. (1997) Electrophoresis 18: 1451-1463). Other separation techniques may also be utilized for protein separation, such as capillary gel electrophoresis; such techniques are well known in the art.

[0164] Proteins separated by these methodologies can be visualized by standard techniques, such as by staining or labeling. Suitable stains are known in the art, and include Coomassie Brilliant Blue, silver stain, or fluorescent dyes such as Sypro Ruby (Molecular Probes). The inclusion of radioactively labeled amino acids or other protein precursors (e.g., ³⁵S-methionine, ³⁵S-cysteine, ¹⁴C-labelled amino acids, ¹⁵N-amino acids, ¹⁵NO₃ or ¹⁵NH₄⁺ or ¹³C-labelled amino acids) in the medium of C. glutamicum permits the labeling of proteins from these cells prior to their separation. Similarly, fluorescent labels may be employed. These labeled proteins can be extracted, isolated and separated according to the previously described techniques.

[0165] Proteins visualized by these techniques can be further analyzed by measuring the amount of dye or label used. The amount of a given protein can be determined quantitatively using, for example, optical methods and can be compared to the amount of other proteins in the same gel or in other gels. Comparisons of proteins on gels can be made, for example, by optical comparison, by spectroscopy, by image scanning and analysis of gels, or through the use of photographic films and screens. Such techniques are well-known in the art.

[0166] To determine the identity of any given protein, direct sequencing or other standard techniques may be employed. For example, N- and/or C-terminal amino acid sequencing (such as Edman degradation) may be used, as may mass spectrometry (in particular MALDI or ESI techniques (see, e.g., Langen et al. (1997) Electrophoresis 18: 1184-1192)). The protein sequences provided herein can be used for the identification of C. glutamicum proteins by these techniques.

[0167] The information obtained by these methods can be used to compare patterns of protein presence, activity, or modification between different samples from various biological conditions (e.g., different organisms, time points of fermentation, media conditions, or different biotopes, among others). Data obtained from such experiments alone, or in combination with other techniques, can be used for various applications, such as to compare the behavior of various organisms in a given (e.g., metabolic) situation, to increase the productivity of strains which produce fine chemicals or to increase the efficiency of the production of fine chemicals.

Equivalents

[0168] Those of ordinary skill in the art will recognize, or will be able to ascertain using no more than routine experimentation, many equivalents to the specific embodiments of the invention described herein. Such equivalents are intended to be encompassed by the following claims.

### Appendix B: Amino Acid Sequences

[0169]

| > RXA00001 (1-1128, translated) 376 residues | | | | | |
|---|---|---|---|---|---|
| MATVTFKDAS | LSYPGAKEPT | VKKFNLEIAD | GEFLVLVGPS | GCGKSTTLRM | LAGLENVTDG |
| AIFIGDKDVT | HVAPRDRDIA | MVFQNYALYP | HMTVGENMGF | ALKIAGKSQD | EINKRVDEAA |
| ATLGLTEFLE | RKPKALSGGQ | RQRVAMGRAI | VRNPQVFLMD | EPLSNLDAKL | RVQTRTQIAA |
| LQRKLGVTTV | YVTHDQTEAL | TMGDRIAVLK | DGYLQQVGAP | RELYDRPANV | FVAGFIGSPA |
| MNLGTESVKD | GDATSGHARI | KLSPETLAAM | TPEDNGRITI | GFRPEALEII | PEGESTDLSI |
| PIKLDFVEEL | GSDSELYGKL | VGEGDLGSSS | EDVPESGQIV | VRAAPNAAPA | PGSVFHARIV |
| EGGQHNFSAS | TGKRLP | | | | |
| > RXA00002 (1-684, translated) 228 residues | | | | | |
| VLHREGKGGL | LGAYIAGFEW | GLEKDYHVLC | EMDADGSHAP | EQLHLLLEEI | EKGADLVIGS |
| RYVPGGETVN | WPANRELLSR | LGNKYISVAL | GAGINDMTAG | YRAERRELLE | HLDFEELSNA |
| GYIFQVDVAF | RAIKDGEDVR | EVPITFTERE | LGESKLDGSF | VKDSLLEVTK | WGVAHRSEQI |
| SDFTSEVSKI | ASRTVKDMEL | GPKATTAKNA | VPDFVSEVSN | LAKGTFKK | |
| > RXA00089 (1-999, translated) 333 residues | | | | | |
| MATPASAPTS | EPRLKRTRAK | LEDWKLLIGI | IFVAGLVVLS | LLTGQYDIFG | GDDGQLMFEA |
| VRIPRTVSLI | LSGAAMAMCG | LVMQLLTQNK | FVEPSTTGTT | EWAGLGLLFV | IYFVPAATVL |
| DRMLGAVVFS | FIGTMVFFLF | LRRVTLRSSL | IVPIIGIMLG | AVVSSISSFF | ALQFDMLQQL |
| GTWFAGSFNT | VFRGQYEVLW | IVVIVVIAVF | FFADRLTVAG | LGEEIATNVG | LNYNRMVLIG |
| TGLIAIATGV | VTVVVGSLPF | LGLIVPNVVS | MFRGDDLRSN | LPWVCLTGIA | IVTICDLISR |
| TIIAPFEIPV | SVILGIIGAV | VFVIMIVRQR | GRG | | |
| > RXA00090 (1-1119, translated) 373 residues | | | | | |
| VAVDKDIENR | TSDLSRWETM | EESATVEGRT | DVELASAPSK | RRTSGAFQTA | RAKRRYWIIM |
| AALLVTALAF | TWGLIWYKNP | MPVGHPAFAL | IAERRMESVF | VMLIVAVCQG | FATVAFQTVT |
| NNRIITPSIM | GFESLYTLIH | TSTVFFFGAT | ALLATRNLEM | FVGQLVIMVL | LTLVLYTWLL |
| SGKRGDMHAM | LLVGIIIGGG | LGSISTFMQR | ILTPSEFDIL | SARLFGSVNN | AETEYFPIAV |
| PLVVVASVLL | LLSSRRLNVV | GLGKDAATNL | GINHRRSSIY | TLVLVSVLMA | VSTALVGPMT |
| FLGELVATLA | YQFADTYDHR | YILPMSALIG | FVVLSGAYFV | MNHVFRAQGV | VSIIIEMVGG |
| TVFLIVILRK | GRL | | | | |
| > RXA00099 (1-1173, translated) 391 residues | | | | | |
| VKNPRLIALA | AIILTSFNLR | TAITALAPLV | SEIRDDLGVS | ASLIGVLGMI | PTAMFADAAF |
| ALPSLKRKFT | TSQLLMFAML | LTAAGQIIRV | AGPASLLMVG | TVFAMFAIGV | TNVLLPIAVR |
| EYFPRHVGGM | STTYLVSFQI | VQALAPTLAV | PISQWATHVG | LTGWRVSLGS | WALLGLVAAI |
| SWIPLLSLQG | ARVVAAPSKV | SLPVWKSSVG | VGLGLMFGFT | SFATYILMGF | MPQMVGDPQL |
| GAVLLGWWSI | LGLPLNILGP | WLVTRFTNCF | PMVVIASVMF | LIGNGGFCLA | PDVAPWLWAT |
| LSGLGPLAFP | MALTLINIRA | ETSAGASALS | SFGQGLGYTI | ACFGPLLTGF | IVDATGSFRT |
| IFLLFAGATL | FVTRGGYFAT | RQVYVEKLLN | R | | |
| > RXA00123 (1-1119, translated) 373 residues | | | | | |
| MPKNYDINGA | IRRRDMLRRR | YLPDSANSTP | VPEEVSPLTR | YVTDGIPKRP | PLGATVADGL |
| KFAEGASNRM | VMSLYPAPSK | PAIEELAEAW | DLHPTIVEDL | LLGQQRPKLD | RYEDIIFIAI |
| RSARYIDSRE | EVDFSEFHIL | MKPQAIAILC | QDNQWIDGTS | AASFSNPEEI | DKRIKTLLAD |
| AELLSSGPRA | AAYRLLDAIV | DGFSPVLRGI | AIDQEQIERQ | VFSGDAAVAE | RIYNLSQEII |
| DMQHTTSSVT | EVVQRLNKDF | IRSGMSEELR | AYLDDVADHL | TRDNTRVSEY | RESLSQILNV |
| NATLVAQRQN | EDMKKISGWA | AIIFAPTLVS | SIYGMNFDIM | PELHWAFGYP | LALLANLGFT |
| LLLYWIFKRS | KWM | | | | |
| > RXA00160 (1-573, translated) 191 residues | | | | | |
| MLNIARNRNM | KRRLAIAAFV | ATATATATMA | PASAQTDYAG | LSSGVADTVA | EAAGVATTAV |
| APAATVARPA | NGTFTSGFGP | RWGTFHNGID | IANSIGTPIY | AVMAGTVISS | GPASGYGQWI |
| RIQHDDGSIS | IYGHMEYLYV | SVGERVAAGQ | EIAGMGSQGF | STGSHLHFEI | HPDGVTPVDP |
| QAWLANHGIY | V | | | | |
| > RXA00193 (1-843, translated) 281 residues | | | | | |
| MQATLKKYFP | VFVLPTLLAF | MIAFLVPFIV | GFFLSFTKFT | TITNAKWVGI | DNYVKAFSQR |
| EGFISAFGFT | VLVVIVSVIT | VNIFAFLLAW | LLTRKLRGTN | FFRTVFFMPN | LIGGIVLGYT |
| WQTMINAVLS | HYATTISADW | KFGYAGLIML | LNWQLIGYMM | IIYIAGLQNV | PPELIEAAEL |
| DGVNKWEMLR | HVTIPMVMPS | ITICLFLTLS | NSFKLFDQNL | ALTNGAPGGQ | TEMVALNIIN |
| TLFNRMNVEG | VGQAKAVIFV | VVVVVIAYFQ | LRATRSKEIE | A | |
| > RXA00203 (1-912, translated) 304 residues | | | | | |
| MLNNGALVGL | IALCVGLFIA | TPHFLTIPNL | INIGIQSATV | AILAFGMTFV | IVTAGIDLSV |
| GSVAALGAMT | SAYFFAEVGL | PGWITLLIGL | FIGLLAGAIS | GISIAYGKLP | AFIATLAMMS |
| IARGITLVIS | QGSPIPSAPA | VNALGRTYFG | IPMPILMMAL | AGIVCWFILS | RTVLGRSMYA |
| IGGNMEAARL | SGLPVKKILV | MVYALAGVYA | ALAGLVMTGR | LSSAQPQAGV | GYELDAIAAV |
| VIGGASLAGG | TGKATGTLIG | AILLAVIRNG | LNILNVSSFW | QQIVIGCVIA | LAVGFDVIRN |
| KTSR | | | | | |
| > RXA00204 (1-1572, translated) 524 residues | | | | | |
| MVNSEQALHQ | HDPAPILQLD | KVSKSFGPVN | VINQVSIDVR | PGRVLALLGE | NGAGKSTLIK |
| MMSGVYQPDG | GQILVDGKPT | TLPDTKTAES | FGIATIHQEL | NLVPTMTVAE | NVMLGRTPRK |
| WGLVNFKHLR | RQAQAALDLI | GVDVDLNAQV | GSLGIARQQM | VEIAKALSMN | ARILILDEPT |
| AALTGREIDQ | LFKVVDQLKE | KGVAMVFISH | HLDEIARIGD | TVSVLRDGQF | IAELPADTDE |
| DELVRLMVGR | SIENQYPRSA | PEIGQPLLEV | KNLNAEGRFT | DISLTVRAGE | VVGLAGLVGA |
| GRTEVVRSIA | GVDKVDSGEV | IVAGKKLRGG | DISEAIKNGI | GHIPEDRKAQ | GLVLGSSVED |
| NLGLATLAST | ARAGLVDRSG | QHKRAAEVAE | KLRIRMASLK | QPISDLSGGN | QQKAVFGRWV |
| LAGSNVLLLD | EPTRGVDVGA | KVEIYNIINE | MTEKGGAVLM | VSSELPEVLG | MADRILVMSG |
| GRIAGELPAK | GTTQDDVMAL | AVSQVDDSIT | EEAAAEIENT | KEDR | |
| > RXA00270 (1-888, translated) 296 residues | | | | | |
| MIGAFEFGLL | YGVVALGVYL | TFRVLNFPDL | TVDGSLTTGA | ATAATALMSG | WPPLMATAAG |
| FVTGFIAGMI | TGLLHTKGKI | DGLLAGILTM | IALWSVNLRI | MGGANVPLLR | TDNLFTPLRD |
| AGLLGTWAGP | AILAVAVGIL | GLIVIWFLNT | DIGLSLRSTG | DNGPMVQSFG | VSTDFTKILT |
| ISLSNGFVGL | AGALIAQYQG | FADISMGIGL | IVIGLASVIL | GQAIFGQRRV | WLAVLAVIVG |
| AIAYRLIIFA | ALRVGLDPND | MKAISAILVV | VAMLLPRWRA | KFSKAPKPKQ | PVAVEA |
| > RXA00311 (1-855, translated) 285 residues | | | | | |
| MEHSPEGKRG | FFTSSVMAGC | SVGNVLAGLV | FIPFLMLPEE | HLMSWGWRVP | FLLSALVLVV |
| AYFVRTRLEE | ASTEKAEEDA | GAPALAVLRT | QGIDVARVFL | ITFFAVVQTT | FNVYALAYAA |
| NEIGIDRSFM | VMVNTIALGL | SIGTIPLAAW | VSDRIGRKPV | LLFGAITCAI | TTYFYFQAIS |
| EADLVLIFAL | CLVNQGLFYS | CWNGVWTIFF | PEMFASSVRY | TGMAMGNQLG | LIIVGFAPTI |
| ATALYAWNGW | EAVAGFIIGA | IALSAAVILT | TKETAFTKLE | DLGKK | |
| > RXA00312 (1-426, translated) 142 residues | | | | | |
| METVRTATAA | PETASLKLRE | AESPAKSPKK | AALASLLGST | LEYYDFVIYG | TASALLFNHL |
| FFPQGDPVVA | TIGSLASFGV | AYIARPIGGL | VMGHVGDKIS | RKTALMVTLM | IMGIASISIG |
| LLPTYGQIGI | WATVLLMIAR | IA | | | |
| > RXA00345 (1-951, translated) 317 residues | | | | | |
| MAGMKKLLWT | LPILPLVLAG | CSTGSADSAD | STNAAGSNSL | KVVTSTQVWA | DVAEAVAPDV |
| DIEAIITGGD | IDPHSFEPSA | TDMAKVSEAD | IIIVGGGGYD | SWLYGTLEDD | DRIIHALDLS |
| EHDHSEHDDH | EHEAEEAHEH | DHDEEGHDHD | VDNEHVWYST | EYVSEVAEEF | AEKVTELDPE |
| AQADATAVTT | KMDELHNQIH | DLPAVRIAQT | EPIADHILSH | SDMVESTPEG | YRATTLSESE |
| PTAADVASFQ | DAINNGDLDV | LTYNPQSAST | VATSLKDLAE | EKGIPVVEIY | ETPQNTENFL |
| DAFTKAVDDL | TAATNQV | | | | |
| > RXA00378 (1-1773, translated) 591 residues | | | | | |
| KSWRSYPSWF | AFDHGTLTQN | EIYFDVACGI | TVLLLAGRLL | TRRRSQSSLL | AELGRLQIDP |
| QRIVTVVRKH | RLKRVVQELN | IPVQEVRVND | DVKVPPNTTI | PVDGTVIGGG | SRIAASIIMG |
| QDQRDVKVND | KVFAGSLNLE | SEIKVRVIRT | GHRTRIAAVH | RWVKEATLKE | NRHNRAAIRS |
| AGNLVPITFT | LAVVDFCLWA | LISGNINAAF | TTTLAVLACV | APVALALSAP | LATRNSIEAA |
| ARHGILVRSG | EIFRVLDDVD | TAVFNRVGTL | TDGEMTVETV | TADKGEDPEL | VLRVAGALAM |
| ESHHAISKAL | VKASREARDT | GAGGEDVPHW | IEVGNVEITE | AGSFQATIEL | PLIKPSGEKI |
| MRTTEALLWR | PRSMTEVREH | LSPRLVAAAT | SGGAPLIVRW | KGKDRGVITL | SDHVRSDSSD |
| AIIAIEEQGI | ETMMLSRDTY | PVARRYADSL | GITHVLAGIA | PGKKAQVVRA | VHTRGSTVAM |
| IGDESVMDCL | KVADVGVLMG | VDRPSDLRDD | SDDPAADVVV | MREEVMSVPT | LFKLARRYAK |
| LVNGNIALAW | IYNGVAMVLA | VSGLLHPMAA | TVAMLASSLL | IEWRSGRARK | Y |
| > RXA00412 (1-1080, translated) 360 residues | | | | | |
| VSHTASTPTP | EEYSAQQPST | QGTRVEFRGI | TKVFSNNKSA | KTTALDNVTL | TVEPGEVIGI |
| IGYSGAGKST | LVRLINGLDS | PTSGSLLLNG | TDIVGMPESK | LRKLRSNIGM | IFQQFNLFQS |
| RTAAGNVEYP | LEVAKMDKAA | RKARVQEMLE | FVGLGDKGKN | YPEQLSGGQK | QRVGIARALA |
| TNPTLLLADE | ATSALDPETT | HEVLELLRKV | NRELGITIVV | ITHEMEVVRS | IADKVAVMES |
| GKVVEYGSVY | EVFSNPQTQV | AQKFVATALR | NTPDQVESED | LLSHEGRLFT | IDLTETSGFF |
| AATARAAEQG | AFVNIVHGGV | TTLQRQSFGK | MTVRLTGNTA | AIEEFYQTLT | KTTTIKEITR |
| > RXA00413 (1-897, translated) 299 residues | | | | | |
| MKLRRITTTA | IAGLFAATAL | VACGSDSDGS | STTVAEGTEG | VTIRIGTTDA | AKEAWTVFED |
| KAAEEGITLD | IVPFSDYSTP | NEALAQDQLD | VNLFQHLKFL | AEYNVGSGAD | LTPVGSSEIV |
| PLALFWKDHD | SIDGIDGESV | AIPNDPSNQG | RAINVLVQAG | LVTLKTPGLV | TPAPVDIDEA |
| ASKVSVIPVD | AAQAPTAYQE | GRPAIINNSF | LDRAGIDPNL | AVFEDDPESE | EAEPYINVFV |
| TKAEDKDDAN | IARLVELWHD | PEVLAAVDRD | SEGTSVPVDR | PGADLQEILD | RLEADQENA |
| > RXA00431 (1-675, translated) 225 residues | | | | | |
| MVSIDTYNAC | VDFPIFDAKS | RSMKKAFLGA | AGGAIGRNQD | NVVVVEALKN | VNLHLREGDR |
| VGLVGHNGAG | KSTLLRLLSG | IYEPTRGSAD | IRGRVAPVFD | LGVGMDPEIS | GYENIIIRGL |
| FLGQTRKQMK | AKMEEIADFT | ELGEYLSMPL | RTYSTGMRIR | LALGVVTSIE | PEILLLDEGI |
| GAVDAAFMAK | ARDRLQALVE | RSGILVEAST | QRLSCQLCNT | ALWVD | |
| > RXA00444 (1-777, translated) 259 residues | | | | | |
| LLIPATLAML | LIIGPIEALL | LQIPWDRSWE | LLTAPESLGT | ARLSIGTALF | STALCAIVGF |
| PLALALHLYE | RSHPRVTSVL | TVLVYAPLVL | SPVVSGLALT | FLWGRRGFLG | SWLDQVGLPI |
| AFTTTAVVFA | QVFVALPFFI | STVTTALRGI | PKQFEEIAAT | EGATRWEIMH | KMIIPLAMPG |
| IFTGMILGFA | RALGEYGATL | TFAGNIAGVT | RTIPLHIELG | LSSNDMDKAL | GAVIMLLAVY |
| VLIIGAIGAL | RLESKVRKV | | | | |
| > RXA00445 (1-912, translated) 304 residues | | | | | |
| MADLSIEHVS | RFFGDAIALN | DVSLTVPSGS | ITAIIGPSGS | GKTTLLRLLA | GLDSPDEGTV |
| SIGNKIAKLG | DTALCEQDSP | LYPHLNVWEN | VAFPLKLKAT | NTADEVVKKR | VSDVLEMLEI |
| APLARRKITE | LSGGQKQRVG | IARALVRDVE | VYLFDEPMAH | LDQALARDIV | ADLRKIQQSL |
| GLTFVYVTHS | KSEAFALADQ | IVVLVDGQVA | QVGEAEELVE | KPKTLEIAEF | LSPTELNVRR |
| RGDAVEAWRP | EDTQLARGGT | ATVEAVTYLG | REWLVQTTEG | HAVSEEKEDV | GESVTLTQKK |
| VESF | | | | | |
| > RXA00466 (1-987, translated) 329 residues | | | | | |
| VQSRLSKILR | SSVVGVAVLA | LLAGCSNNAD | DTDADSTSTG | NSAFPVSIEH | EFGTTTIDDV |
| PERVVTLGVT | DADIVLALGT | VPVGNTGYKF | FENGLGPWTD | ELVEGKELTL | LDSDSTPDLE |
| QVAALEPDLI | IGVSAGFDDV | VYEQLSDIAP | VVARPAGTAA | YAVAREEATN | LVARAMGQSE |
| KGQELNEETD | ALIQAARDEN | PSFDGKTGTV | ILPYQGKYGA | YLPGDARGQF | LDSLGISLPE |
| AVLSRDTGDS | FFVDVPAESV | KDVDGDVLLV | LSNDENLDIT | AENPLFETLN | VVQKDAVIVA |
| TTEERGAITY | NSVLSVPFAL | EHLAPRIAE | | | |
| > RXA00482 (1-648, translated) 216 residues | | | | | |
| MRISSKLVTT | ALLAAISLFG | ISTAQAQDIF | DGGRLAGGSS | QVSNLSSVPE | NLALPEIENS |
| IDLERYKGKW | YQVAAIPQPF | SLQCSHDVTA | DYGVIDSDTI | SVTNKCGTFF | GPSVIEGSAK |
| VVSNASLKVS | FPGIPFQSED | NQANYRVTYI | EDDYSLAIVG | SPSRSSGFIL | SRTPQLSSDQ |
| WSHVRNITED | SGWWPCAFIT | VPATGGLNTA | TPLCTL | | |
| > RXA00523 (1-750, translated) 250 residues | | | | | |
| VLRNQLASPD | IIGISSGASA | AGVICIVFFG | MSQSAVSAIS | LCASLAVALL | IYLVAYRGGF |
| SATRLILTGI | GIAAMLNSLV | SYSLSKADSW | DLPTATRWLT | GSLNGATWDR | AMPLIVTTVV |
| LIPLLVANAR | NVDLMRLGND | SAVGLGVATN | RTRVIAIIAA | VALIAVATAA | CGPIAFVAFV |
| SGPIAARILG | SGGSLIIPSA | LIGGLIVLIA | DLIGQYFLGT | RYPVGVVTGA | FGAPFLIYLL |
| IRSNRAGVTL | | | | | |
| > RXA00525 (1-660, translated) 220 residues | | | | | |
| MSLAESILLA | LTSLRSNKMR | ALLTLLGVII | GIASVIGILT | IGKALQDQTL | NSLESLGAND |
| LSAQVEERPD | EDSPEPDMFA | FSGAANSSGN | LIPEETVDTL | RDRFAGSITG | ISVGGMGTQG |
| TLIGDTADLK | SDLLGVNEDY | MWMNGVEMNY | GRAITQDDVA | AQRPVAVIAP | DTFNTLFDAN |
| PNLALGSEVA | FELNGQETFL | RVIGVYKEAA | AGGLVGSNPT | | |
| > RXA00556 (1-594, translated) 198 residues | | | | | |
| YTPYTVANDI | THTKDGLNTL | SIRAAQGVDQ | DSLKGSLQTY | FDALYANNDS | HHVAMLDFRK |
| QIEEFNTILG | AMSLGISAIG | GISLLVGGIG | VMNIMLVSVT | ERTREIGVRK | ALGARRRDIR |
| LQFVVEAMII | CFIGGILGVL | LGGILGLIMS | SAIGYISLPP | LSGIVIALVF | SMAIGLFFGY |
| YPANKAAKLD | PIDALRYE | | | | |
| > RXA00596 (1-453, translated) 151 residues | | | | | |
| MLNALKFIPW | LIGQIFLSGF | SVITAAVKKD | TGFNPVVIRY | PLRVTTDFQI | AALSTCITAT |
| PSTLSLGLRE | PRKPGDPTIL | LIQAVFGSDP | VEVFESIADM | EQRLVPSVAS | IDHGVPGQGP |
| YKEIRPSDAE | WPSREIADTA | QNTVSQDKRE | F | | |
| > RXA00634 (1-1383, translated) 461 residues | | | | | |
| MWERFSFYGM | QALLVYYLYF | DVAAGGLGLD | QTQATGLVGV | YGALLYLCCW | AGGWVSDRVL |
| GAEKTLLGGA | ISVTIGHLVL | AGLGGKIGLA | IGLGCIAIGS | GFVKTAAITV | LGSRHGEQEG |
| DAKADPAFQL | FYLGINVGAL | LGPLLTGWLS | SRYSFEMGFG | AAAVLMIGGL | GIYAALRKPM |
| LQSFPLEVKK | ALLRAQNPAE | KHVISTAFAA | VAVLCGVLLY | LLLTETVSAD | QLAGALLLVT |
| IGAALWLIIQ | PLRHPQVSSE | EKRKVLAFIP | IFVCSTAFWA | VQAQTYGVLA | VYSQERVDRM |
| VGDFEIPAAW | SQSLNPFFIL | ALSIPISLWF | MRGSRAPRVK | IGISIGVIIA | GSGLLVLIPF |
| VGMPLAPVWV | LPLSVFLISL | GELFIGPGGM | AATAHHAPRI | FATRFSALYF | LTLAIGMSIA |
| GNVSKFYDPT | NHTSELRYFA | VFGISIIVIG | VGSLMVAKKV | G | |
| > RXA00665 (1-438, translated) 146 residues | | | | | |
| MSSSTLLLAS | GQVTALAADY | TLSHTPSDGI | LVVLGFAMIL | TFMTLIMLGR | LTPMVAMLLV |
| PTIFGLIAGA | GLGLGDMALD | AIKDMAPTAA | LLMFAIMFFG | IMIDVGLFDP | LIRVITRVLH |
| DDPAKVVIGT | AVLAGVVSLD | GDGSTT | | | |
| > RXA00702 (1-1320, translated) 440 residues | | | | | |
| LGLPPAVMRK | RVEETLDLLG | IAELRYVPLA | ELSGGEQQRV | AIGAVLTTRP | ALIILDEPTS |
| ALDPNGAEDV | LATVTKLAHD | LAMTVVLAEH | RIERVLQYVD | RVAHVGADGH | VTVGTPEEIM |
| ADSDVAPPIV | ELGRWAGWAP | LPLSIRDARA | HSADMRKRLY | QRGLVVNKLH | NHAVQPLLIA |
| EDIMVDFPEI | RAVDGVNLNL | NSGEITVLMG | RNGCGKSSLL | WALQGSGTRN | QGSVQVLDEA |
| AGFSWTDPKT | LKPAKRRNLV | SMVPQTPTDI | LYESTVHAEL | ARSDKDAAAP | AGTTREILDS |
| LVPNIPDHLH | PRDLSEGQKL | SLALSIQLAA | KPRVVFFDEP | TRGLDYDGKK | SLARSFQQLA |
| DDGHAILVVT | HDVEFSALCA | DRVLFMASGK | IISDGTAVEI | LPASPAYAPQ | VAKITAGIQE |
| ESHWLTVSAV | KAALGHGEIS | | | | |
| > RXA00728 (1-792, translated) 264 residues | | | | | |
| VAAAIIVALL | AWFIISALNN | EAYGWDTYRS | YLFDTRIATA | ALHTIALTLL | SMILGVVLGA |
| ILAVMRMSGN | PVMQGVAWLY | LWIFRGTPIY | VQLVFWGLLG | SLYQSINLGF | AEIDLQSLLS |
| NMFLLAVIGL | GLNEAAYMAE | IVRSGIQAVP | EGQMEASKAL | GMNWSMTMRR | TILPQAMRII |
| IPPTGNELIS | MLKTTSLVVA | IPYSLELYGR | SMDIAYSLFE | PVPMLLVAAS | WYLVITSILM |
| VGQYYLEKHF | EKGSTRTLTA | RQLA | | | |
| > RXA00732 (1-822, translated) 274 residues | | | | | |
| MLVQMTSTLM | ISAPMLAIGG | IIMAVRQDLG | LSWLMVVSIP | VLIIVVALII | VRMVPLFQTM |
| QKRIDRINQI | IREQLTGIRV | IRAFVREDVE | RERFTTASKD | VADIGVRTGN | LMALMFPAVM |
| LIMNLSAVAV | IWFGAFQVES | GETQIGTLFA | FLQYIMQILM | GVMMAAFMFV | MVPRAAVSAD |
| RIGEVLETTP | SVQAPETPAQ | PSTSAGEIVF | NNATFAYPGA | DDPVLNNVSF | RVAPGSTTAI |
| IGSTGSGKTT | LIGLVPRLFD | VTEGDVTVDG | TDVR | | |
| > RXA00734 (1-453, translated) 151 residues | | | | | |
| RHLRYGNEDA | TETQLWQALA | IAQAADFVRE | MPEGLDSEIA | QGGTNVSGGQ | RQRLAIARAL |
| LKQPEIYIFD | DSFSALDVST | DAALRRALST | NLPDATKLIV | AQRVSTIRDA | DQIVVLDNGE |
| VVGIGTHTNL | LNTCGTYREI | VESQETAQAQ | S | | |
| > RXA00759 (1-924, translated) 308 residues | | | | | |
| MLRYVGRRLL | QMIPVFFGAT | LLIYALVFLM | PGDPVQALGG | DRGLTEAAAE | KIRQEYNLDK |
| PFIVQYLLYI | KGIFVLDFGT | TFSGQPVIDV | MARAFPVTIK | LAIMALLFES | ILGIIFGVIA |
| GIRRGGIFDS | TVLVLSLIVI | AVPTFVIGFV | LQFLXGVKWG | LLPVTVGSNT | SITALIMPAV |
| VLGAVSFAYV | LRLTRQSVSE | NLRADYVRTA | RAKGMSGENV | MNRHVLRNSL | IPVATFLGAD |
| LGALMGGAIV | TEGIEGINGV | GGTLYQAILK | GEPTTVVSIV | TVLVIVYIIA | NLLVDLIYAV |
| LDPRIRYA | | | | | |
| > RXA00760 (1-1032, translated) 344 residues | | | | | |
| MPNNEFHTNH | SLGQDDQTPD | QAHFFPQGRG | EALVRPGQEH | FIAATDETGL | GAVDAVADDS |
| APTSMWGEAW | RDLRRRPLFW | VSAVLIILAL | LLAAVPQLFT | STDPQFCVLA | NSLDGPQSGH |
| PEGFDRQGCD | IFARTVYGAR | ASVAVGVLTT | LLVALIGTVF | GALAGFFGGI | MDTILSRITD |
| MEFAIPLVLA | AIVVMQMFKE | HRTIVTVVLV | LGLFGWTNIA | RITRGAVMTA | KNEEYVTSAR |
| ALGASKAKIL | LSHIMPNAAA | PIIVYATVAL | GTFIVAEATL | SFLGIGLPPS | IVSWGADIAK |
| AQTSLRTQPM | VLFYPAMALA | LTVLSFIMMG | DVVRDALDPK | SRKR | |
| > RXA00761 (1-591, translated) 197 residues | | | | | |
| MTTNIPQTPN | HEGEQPLLEL | KDLKISFTSS | TGVVDAVRGA | NLTIYPGQSV | AIVGESGSGK |
| STTAMSIIGL | LPGTGKVTEG | SIMFDGQDIT | GLSNKQMEKY | RGSEIGLVPQ | DPMTNLNPVW |
| RIGTQVKESL | RANHVVPGSE | MDKRVAEVLA | EAGLPDAERR | AKQYPHEFSG | GMRHRALIAI |
| GLAARPKLLI | ADEPTSA | | | | |
| > RXA00774 (1-654, translated) 218 residues | | | | | |
| MDKATDALLR | TSLASAESAL | GNAEKLEELR | TGCESQAVEL | LALETPVARD | LRQVVSSIYI |
| VEEITRMGAL | AMHVANSVRR | RYPDPVIPED | MRGYFKEMAR | LAADMTDHIR | QILIDPEPDL |
| ALEMAKSDDA | VDDLHQHIMR | ILTLRPWPHD | TKSAVDLTLL | SRFYERYADH | TVNVAARIIY |
| LSTGLHPEEY | MEKREQQRAD | ADMEKRWAEL | ERQFRTSE | | |
| > RXA00775 (1-771, translated) 257 residues | | | | | |
| MSKLKLNDVN | IYYGDFHAVQ | NVNLEVPARS | VTAFIGPSGC | GKSTVLRSIN | RMHEVTPGAY |
| VKGEILLDGE | NIYGSKIDPV | AVRNTIGMVF | QKANPFPTMS | IEDNVVAGLK | LSGEKNKKKL |
| KEVAEKSLRG | ANLWEEVKDR | LDKPGGGLSG | GQQQRLCIAR | AIAVEPEILL | MDEPCSALDP |
| ISTLAVEDLI | HELKEEFTIV | IVTHNMQQAA | RVSDQTAFYS | LEATGRPGRL | VEIGPTKKIF |
| ENPDQKETED | YISGRFG | | | | |
| > RXA00776 (1-921, translated) 307 residues | | | | | |
| MTNNVVTPRM | DEPLKKSSAF | TDISSSRKTT | NTAATVIIYG | AMLIAAVPLV | WVLWTVISRG |
| IAPILTADWW | STSQAGVMLM | LPGGGAAHAM | IGTFMQAVVT | SVISIPIGIF | TAIYLVEYSN |
| GNRLGRLTTF | MVDILTGVPS | IVAALFVYSL | WIVLFGFDRS | GFAVSLSLVI | LMVPVIIRNT |
| EEMLRVVPQD | LREASYALGV | PKWKTIAKIV | LPTALSGIVT | GVMLAVARVM | GESAPVLVLV |
| GSSQAINWNP | FGGPQASLPL | MMLDMYKAGT | APATLDKLWG | AALTLVLIIA | VLNIGARIIS |
| AKFSVKQ | | | | | |
| > RXA00777 (1-1065, translated) 355 residues | | | | | |
| MATNESVSEK | QRLDATRVQA | HPVAVNANSS | QTKPSKKIVA | EGGGSVKRPG | DRIFEVLSTA |
| SAAIITAIII | AIAAFLIWRA | VPALMRNAEG | IGGFFTYSGA | WNTTDIDAMY | FGIPNLLAAT |
| LLISVIALII | AMPIALGIAI | FLSNYSPKRL | VKPLGYMVDM | LAAVPSIVYG | LWGWQVLGPA |
| LSGFYTWIES | WGGSFFLFAT | YQNSPSFATG | RNMLTGGIVL | AVMILPVIEA | TAREVFIQTP |
| KGHIESALAL | GATRWEVVRL | TVLPFGMSGY | VSGAMLGLGR | ALGETMALYM | VVSPSSAFRF |
| SLFDGGTTFA | TAIANAAPEF | NDNTRAGAYI | SAGLVLFALT | FIVNAGARAM | VNRGK |
| > RXA00828 (1-369, translated) 123 residues | | | | | |
| EHQFVARTVR | DELEIGPKIM | KVDASERIEE | LLDRLRLRHL | ENANPFTLSG | GEKRRLSVAT |
| ALVAAPKLLI | LDEPTFGQDP | ETFTELVTML | RELTDNGISI | VSVTHDPDFI | AALGDHHIEV |
| SAK | | | | | |
| > RXA00832 (1-555, translated) 185 residues | | | | | |
| TLTAVVYGFF | LFRQMGAQAG | EFQEVEVAEK | ADDAAKWEVP | FRGLILIITV | LPIVLLSHDM |
| ATVMDEVLAS | LGAPVAMAGL | IIATIVFLPE | TITSLKAAWT | GEIQRVSNLA | HGAQVSTVGL |
| TIPAVLVIGV | ITGQDVVLGE | TPINLLLLGT | TIAVTAIAFS | SKKVSAVHGS | VLLMLFGVYM |
| MSMFA | | | | | |
| > RXA00934 (1-789, translated) 263 residues | | | | | |
| PSFSMAALPF | AEGPIVATYH | ASSSGSKLLK | AFLPVLSPML | EKVRAGIAVS | EMARRWQVEQ |
| VGGDPVLIPN | GVETSMFKAA | RQIEPNDPVE | IVFLGRLDES | RKGLDILLRA | LTRLDRPFTC |
| TVIGGGTPRE | VAGINFVGRV | SDEEKAAILG | RADIYVAPNT | GGESFGIVLV | EAMAAGCAVV |
| ASDLEAFSLV | TDSEAAQPAG | VLFKTGSDAD | LAKKLQALID | DPSSRSTLIA | AGLKRANAYD |
| WSTVSTQVMA | VYETIAIDKV | RLG | | | |
| > RXA00939 (1-168, translated) 56 residues | | | | | |
| GVLLGGVTMS | IGMLVHEASV | LLVIAIAMLL | LRPTLKEDKD | KADVSTADAA | KETLSA |
| > RXA00942 (1-204, translated) 68 residues | | | | | |
| LSTKNYHVEG | LTCANGVASV | EDEIGIVAGT | QGVDIDIETG | RVTVTGEGFT | DEEIIEAVAN |
| AGYKVSGR | | | | | |
| > RXA00950 (1-906, translated) 302 residues | | | | | |
| MNTPAVQVQN | LSLSEGSFTA | VNGLSLTVEQ | GSIHGFLGPN | GAGKSTTIRA | LIGVLKPQTG |
| SVAILGQDPV | AHPDVLRRVG | YVPGDATLWD | NLTGAEVFRA | LESLRKTPSN | RALENELIDA |
| FQLDPSKKIR | EYSTGNRRKV | SLIAALSHEP | ELLIVDEPTA | GLDPIMEQVF | VTYVRKARTN |
| GASVLLSSHI | LSEVEQLCDY | VTVLKEGRAV | ASNEVSYLRK | ISAHRITATI | PAVPQHLAGR |
| GEVDFDAGHL | SITCDASEVP | DILRIIIDAG | GQDIISTAAS | LEEIFLRHYG | ETVSGSESKA |
| SQ | | | | | |
| > RXA00960 (1-459, translated) 153 residues | | | | | |
| LKNDVDVNVA | GFVVPLCATI | HLAGSMMKIG | LFTFAVVFMY | DMEVGVGLSI | GFLLMLGITM |
| IAAPGVPGGA | IMAATGMLAS | MLGFNTEQVA | LMIAAYIAID | SFGTAANVTG | DGAIAVIVNK |
| FAKGQLHTTS | PDEIEEDDRV | AFDITPSDVE | HHK | | |
| > RXA00980 (1-639, translated) 213 residues | | | | | |
| MFVGVNGHAI | GIVAVADAVR | SDSASAIESL | HKAGIQVVMA | TGDAHRVAQN | VASKLGVDEV |
| YSELLPEQKL | ELVRDLQAAG | KTVAMVGDGV | NDTPALAAAD | IGVAMGVAGS | PAAIETADIA |
| LMADRLPRLA | HAVTLAKRTV | RTMRINILIA | LATVMVLLAG | VLFGGVTMSV | GMLVHEASVL |
| LVISIAMLLL | RPTLKEDAAQ | ASDIKRSEIQ | QIA | | |
| > RXA01000 (1-540, translated) 180 residues | | | | | |
| MLAARGVGPY | WLRTVLRFVF | AVIRAFPEVV | IAIILLTVTG | LTPFTGALAL | GISGIGQQAK |
| WTYEAIESTP | TGPSEAVRAA | GGTTPEVLRW | ALWPQVAPSI | ASFALYRFEI | NIRTSAVLGI |
| VGAGGIGSML | ANYTNYRQWD | TVGMLLIVVV | VATMIVDLIS | GTIRRRIMKG | ASDRVVAPSN |
| > RXA01002 (1-417, translated) 139 residues | | | | | |
| PTEHDKQIAF | HALESVGILD | KVWTRAGALS | GGQKQRVAIA | RALSQDPSVM | LADEPVASLD |
| PPTAHSVMRD | LENINNVEGL | TVLVNLHLID | LARQYTTRLV | GLRAGKLVYD | GPISEATDKD |
| FEAIYGRPIQ | AKDLLGDRA | | | | |
| > RXA01003 (1-804, translated) 268 residues | | | | | |
| MTTPSSTLIP | QKPRAGVKTY | LIIGAIVVFT | VATATPALGG | IELDFASIAA | NWRNGANKLL |
| QMLQPNFAFL | PRTWLPMLET | LQMALVGAVL | SAAVSVPLTL | WAAQATNTSA | IGRGIVRTII |
| NVVRSVPDLV | YATILVAMVG | VGALPGILTL | FLFNLGIVVK | LVSEAIDSTE | HPYMEAGRAA |
| GGSQFQINRV | SALPEVMPLF | ANQWLYTLEL | NVRISAILGI | VGAGGIGRLL | DERRAFYAYA |
| DVSVIILEIL | IVVIVIEVIS | NALRKRLV | | | |
| > RXA01006 (1-858, translated) 286 residues | | | | | |
| MTTSQILRRI | GQAVLVLLVT | FTLAFIMLSA | LPGDAVSARY | SSPDLGLSPE | QIAQIRESYG |
| ADESLIAQYF | STLGGFLVGN | FGYSVQTGTA | VATQLAEALP | GTLTLAILAF | LLAAILALVI |
| SILATMDRFA | WIKGIFQALP | PFFVSLPSFW | LGIILIQIVS | FRLGWVPVIG | TTPAQGLILP |
| TITLSIPITA | PLAQVLIRSI | EEVKAQPFIA | AVRARGAGEM | WIFFRNIIRN | ALLPTLTIAG |
| ILFGELVGGA | VVTEAVFGRA | GLGQMTVNAV | ANRDMPVMLA | IVVIAA | |
| > RXA01012 (1-1641, translated) 547 residues | | | | | |
| MTTPLLEIND | LVVSYQTAKG | LVHAVNNVSL | EVHPGQITAI | VGESGSGKST | TAQAVIGLLA |
| DNAEVDSGRI | SFNGRSLVGL | NAREWKNVRG | TKIGLIPQDP | NNSLNPVKTI | GASVGEGLAI |
| HKRGTAAERK | KKVIELLERV | GIDNPEVRYD | QYPHELSGGM | KQRALIAAAI | ALEPELIIAD |
| EPTSALDVTV | QKIILDLLED | MQRELGMGIL | FITHDLAVAG | DRADRIVVMQ | KGEVRESGYA |
| ASVLTDPQHE | YSKKLLADAP | SLTIGEIPTR | VPAVDPEVAQ | AKGPLLVVDK | FRKEHQRGKE |
| GAFVAANDIS | FEVLPGTTHA | IVGESGSGKT | TLGRAIAMFN | TPTSGSISVS | GKDITNLSKA |
| QQRELRQQIQ | LVYQNPYSSL | DPRQTIGSTI | AEPLRNFTKV | SKQEADEKVA | HYLELVALDP |
| ALATRRPREL | SGGQRQRVAI | ARAMILEPEL | VVFDEAVSAL | DVTVQAQILR | LLDDLQRELG |
| LTYVFISHDL | AVVREISDTV | SVMSRGNQVE | LGKTAEVFNN | PQTDFTRRLI | DAIPGSRYRG |
| GELNLGL | | | | | |
| > RXA01013 (1-795, translated) 265 residues | | | | | |
| LGNPWTRPAA | VISIVVLAVA | VLMALVPGLF | TSQDPFTGDD | VALLGPSGTH | WFGTDSVGRD |
| LYSRVVYGAR | ETLLGALIAV | LVGLIVGTLI | GLLAGAQRGW | VDTVLMRFVD | VLLSIPALLL |
| SLTVIILLGF | GTMNAAIAVG | ITSVATFARL | ARSQVMTVAG | SDFVEAAYGS | GGTQAQVLFR |
| HILPNSLTPV | FALAALQFGS | AILQLSVLGF | LGYGAPAPTP | EWGLLISDAR | DYMATSWWLT |
| VLPGFVIIAV | VMSANYLSRI | IQKEA | | | |
| > RXA01070 (1-1386, translated) 462 residues | | | | | |
| MANATAQKGR | FGLPGWMTGF | GAQVIAGLIL | GLILGLVARG | MDSGAADGEA | SWLTGLLSGV |
| GSAYVSLLKV | MVPPLVFAAV | VTSVAKLREV | ANAARLAVST | LVWFAITAFF | SVLAGIAVAL |
| IMQPGVGSTV | DASNAADPSR | VGSWLGFIQS | VIPSNILGLS | GSYSENSGVN | LSFNVLQILV |
| ISIAIGVAAL | KAGKSAEPFL | KFTESFLKII | QIVLWWIIRL | APIGSAALIG | NAVATYGWSA |
| LGSLGKFVLA | IYVGLAIVMF | VIYPVVLKLN | GIPVLGFFKR | VWPVTSLGFV | TRSSMGVMPV |
| TQRVTEQSLG | VPSAYASFAI | PLGATSKMDG | CAAVYPAVAA | IFVAQFYGID | LSIMDYVLIM |
| IVSVLGSAAT | AGTTGATVML | TLTLSTLGLP | LAGVGLLLAI | EPIIDMGRTA | TNVTGQALVP |
| AIVAKREGIL | DQDVWDAAEK | GGAAIEMATV | SEKETEPAEV | RS | |
| > RXA01094 (1-948, translated) 316 residues | | | | | |
| MTLATIPSPP | QGVWYLGPIP | IRAYAMCIIA | GIIVAIWLTR | KRYAARGGNP | EIVLDAAIVA |
| VPAGIIGGRI | YHVITDNQKY | FCDTCNPVDA | FKITNGGLGI | WGAVILGGLA | VAVFFRYKKL |
| PLAPFADAVA | PAVILAQGIG | RLGNWFNQEL | YGAETTVPWA | LEIYYRVDEN | GKFAPVTGTS |
| TGEVMATVHP | TFLYELLWNL | LIFALLMWAD | KRFKLEHGRV | FALYVAGYTL | GRFWIEQMRV |
| DEATLIGGIR | INTIVSAVVF | AGAIIVFFLL | KKGRETPEEV | DPTFAASVAA | DAVASPDRKP |
| LPKAGEGIDG | ETPSTR | | | | |
| > RXA01135 (1-324, translated) 108 residues | | | | | |
| VTHILEDSRR | FLQLGAFASL | STALAGAARY | VTSTSNNEPA | DNTPLTIGYV | PIAGSAPIAI |
| ADALGLFKKH | GVNVTLKKYS | GWSDLWTAYA | TEQLDVAHML | SPMTVAIN | |
| > RXA01141 (1-462, translated) 154 residues | | | | | |
| VNSAADLKGM | VLGIPFEYSV | HALLLRDYLV | SNAVDPIADL | ELRLLRPADM | VAQLTVEGID |
| GFIGPGPFNE | RAISNGSGRI | WLLTKQLWDK | HPCCAVAMAK | EWKAEHPTAA | QGVLNALEEA |
| SAILSNPAQF | DSSARTLSQE | KYLNQPATLL | DGPS | | |
| > RXA01142 (1-420, translated) 140 residues | | | | | |
| TRTHLEQVGL | TDAAERRPAR | LSGGMQQRVG | IARAFAIDPP | IMLLDEPFGA | LDALTRRELQ |
| LQLLNIWEAS | RRTVVMVTHD | VDEAILLSDR | VLVMSKSPEA | TIITDIPVNL | PRPRHELSED |
| ASVEAETTAL | RKRMLHLLEH | | | | |
| > RXA01164 (1-1575, translated) 525 residues | | | | | |
| VTLFVRLALA | AVGGLFVFAS | NEPIGWFVAG | IVGTALFFIS | LAPWDLGVPQ | KRRKKNEPVP |
| FLQQMSTGPT | VVQGMLLGFV | HGLVTYLQLL | PWIGEFVGSL | PYVALSVVEA | LYSIALGAFG |
| VLIARWRDWK | VLLFPAMYVA | VEYLRSSWPF | DGFAWVRLAW | GQINGPLANL | AALGGVAFVT |
| FSTVLAAVGV | AMVIISKKRL | AGAIITASVI | AIGAVSSLYV | DRNGTSDESI | EVAAIQGNVP |
| RMGLDFNAQR | RAVLANHARE | TLKLDEQVDL | VIWPENSSDV | NPFSDAQARA | IIDGAVEHVQ |
| APILVGTITV | DEVGPRNTMQ | VFDPVEGAAE | YHNKKFLQPF | GEYMPFREFL | RIFSPYVDSA |
| GNFQPGDGTG | VVEMNAANLG | RAVTVGVMTC | YEVIFDRAGR | DAIANGAEFL | TTPTNNATFG |
| FTDMTYQQLA | MSRMRAIEFD | RAVVVAATSG | VSAIVNPDGS | ISQNTRIFEA | ATLTESIPLK |
| DTVTIAARVG | FYVELLLVII | GVLAGLFAIR | MNSRSKSAKG | SARPA | |
| > RXA01168 (1-720, translated) 240 residues | | | | | |
| RTATPDVHVL | IVDDNSPDGT | GERADKLAAD | DDHIFVLHRE | GKGGLCAEYM | AGFQWGLERD |
| YQVLCEMDAD | GSHAPEQLHL | LLAEITNGAD | LVIGSRYVPG | GRVVNWPKNR | WLLSKGGNVY |
| ISVALGAGLT | DMTAGYRAFR | REVLEALPLD | ELSNAGYIFQ | VEIAYRAVEA | GFDVREVPIT |
| FTEREIGESK | LDGSFVKDSL | LEVTKWGLKH | RGGQAKELSK | EMVGLLNYEW | KHFKKRNTWL |
| > RXA01185 (1-858, translated) 286 residues | | | | | |
| MTDPENSQGT | PQICPTDPTT | QALAVRGLTK | SYGDATVVNN | INLDIPKGAI | YGIVGPNGAG |
| KTTMLSMATG | LLRPNKGTAW | ISGFNVWEEP | NDAKRSMGLL | ADGLPIFDRL | TGKELLTYVG |
| ALRELDEGIV | DQRSEELLEA | LGLKEAAGKR | VVDYSAGMTK | KILLAQALIH | NPKVLILDEP |
| LEAVDPVSGR | LIQQILKNFA | QTGGTVVLSS | HVMELVEGLC | DHVAIINRGV | VEIAGHVNEV |
| RRGRSYRMSS | LMRLKALLFK | RGHYLGWVRP | KAIAKAKIRT | RIGLSK | |
| > RXA01188 (1-1104, translated) 368 residues | | | | | |
| MMNGVVQPQE | HLDATLIAAD | FHGNPENSGD | RKERLNFQGW | KYALNRTVRD | VFPDGLLDLA |
| ALLTFFSILS | IAPAVLLGYS | VITIFLASDS | TEILNLVRDE | VNQYVPEDQS | HVVNGVIDSI |
| AGSAAAGQVG | VAVGVITALW | TSSAYVRAFS | RCANAVYGRS | EGRTLIKRWA | MLLFLNLALL |
| LGIIIILVSW | VLNETLVMGI | FAPIAEPLHL | TNVLSFLTDR | FMPIWIWVRF | PVIVGVLIMF |
| VATLYYWAPN | ARPWKFRWLS | LGSFLAIVGI | LLAGVGLNFY | FTLFAAFSSY | GAVGSLLAVF |
| IALWVFNICL | IIGLKIDVEI | SRAKQLQAGM | PAEDYSLVPP | RSIEKVAKMK | QRQQRLMDQA |
| AAIREESN | | | | | |
| > RXA01245 (1-1767, translated) 589 residues | | | | | |
| ASWVTTLGLG | GEHLDFWWEL | ALLVTIMLLG | HWLEMRALGA | ASSALDALAA | LLPDEAEKVV |
| DGTTRTVAIS | ELAVDDVVLV | RAGARVPADG | TIMDGAAEFD | EAMITGESRP | VYRDTGETVV |
| AGTVATDNTV | RIRVEATGGD | TALAGIQRMV | ADAQASSSRA | QALADRAAAL | LFWFALITAL |
| ITAVVWTIIG | SPDDAVVRAV | TVLIIACPHA | LGLAIPLVIA | ISSERAAKSG | VLIKDRMALE |
| HMRTIDVVLF | DKTGTLTEGA | HAVTGVAPAT | GIAEGELLAL | AAAAEADSEH | PVARAIVTAA |
| AAHPEASQRQ | LRATGFTAAS | GRGIRATVDG | AEILVGGPNM | LREFNLTTPG | ELADITGSWA |
| QRGAGVLHVV | RDGEIIGAVA | VEDKIRPESR | AAVRALQARG | VKVAMITGDA | TQVAQAVGKD |
| LGIDEVFAEV | LPQDKDTKVT | QLQERGLSVA | MVGDGVNDAP | ALARAEVGIA | IGAGTDVAME |
| SAGVVLASDD | PRAVLSMIEL | SHASYRKMVQ | NLVWATGYNI | VAVPLAAGVL | APIGVLLPPA |
| AAAILMSLST | IIVALNAQLL | RRIDLDPAHL | APTDGKEEKA | AVSSAAPVR | |
| > RXA01247 (1-234, translated) 78 residues | | | | | |
| VAAATDATPE | GPTTYQVTGM | TCGHCADNVT | EAVSALPQVD | DVQVDLIAGG | VSIVTVTGSV |
| PLETVHRAIE | ETGYTVLS | | | | |
| > RXA01285 (1-543, translated) 181 residues | | | | | |
| PQTSIAPEGI | RVYDLIARGR | APYQSLIQQW | RTSDEDAVAQ | ALASTNLTEL | AARLVDELSG |
| GQRQRVWVAM | LLAQQTPIML | LDEPTTFLDI | AHQYELLELL | RAFNEAGKTV | VTVLHDLNQA |
| ARYADHLIVM | KDGHVHATGT | PEEVLTAEMV | QGVFGLPCII | SPDPVTGTPT | VVPLSRSRAG |
| A | | | | | |
| > RXA01289 (1-1044, translated) 348 residues | | | | | |
| MTAVAVEKQK | ETSISKNLGR | RRALGILGIV | VALGALIVLS | IAVGANPLSF | SSVWQGFTAH |
| DSSEASIIVW | SMRIPRTLVG | IVTGAAFGVA | GALIQALTRN | PLADPGILGV | NAGAGFAVTV |
| GVGFFGLSSV | TGYIWFAFLG | AAAATLLVYF | IGASTSGSVN | PVALVLAGVA | LAAVLGGVTS |
| FLTLIDPETF | ESIRNWNLGS | VARTDLSDTM | TVLPFLAVGL | AIALLLSGAL | NSIALGDDLA |
| ASLGTKVMRT | RVLGIISVTL | LAGGATALTG | GIGFVGLMVP | HVVRWVVGPD | QRWIITFSAL |
| CAPVLVLGAD | ILGRIIARPG | EIEVGIVTAV | IGAPVLIALV | RRRKASGL | |
| > RXA01290 (1-1164, translated) 388 residues | | | | | |
| VVFNIKSRTD | ETPVAASEPV | ESTRPVSEAS | TSPALNPGYH | AVSVQRRRFS | FRIPARLMVV |
| SLILFAIALC | SATWAITMGD | YPLSLGQVIN | ALAGTGEKFQ | LLVVREWRLP | VAIAAVVFGA |
| LLGTGGAIFQ | SITRNPLGSP | DVIGFDAGSY | TAVVLVILVL | GNTHYWSIAF | AAIVGGIVTA |
| FAVYVLAWRK | GVQGFRLIIV | GIGVSAMLSS | VNAYLITRAD | VEDAMVVGFW | SAGSINRITW |
| QSLLPSLVIA | AVIIVAAIVL | ARSLRFMEMG | DDVATTLGVK | TNSTRLALIV | VGVATSALVT |
| AAAGPISFIA | LVAPQLARRL | TKTPGVSLVA | AAAMGSALLS | CAHLLSLIIS | SFYRTIPVGL |
| LTVSIGGCYM | IWLLLRETRR | QYRTGTIR | | | |
| > RXA01297 (1-798, translated) 266 residues | | | | | |
| MGYVGMVLAI | LEIGLPLVFI | VLTSFKQQSE | IYTQPVTWFP | SEFNFDNYAN | VFERVPFLNY |
| FRNSIIITVI | LCLVKIILGV | ISAYALSILR | FPGRNLVFLL | VISALMVPSE | VTVISNYALV |
| SQLGWRDTYQ | GIIVPLAGIA | FGTFLMRNHF | MSIPSELIEA | ARMDHCGHFR | LLWKVLLPIS |
| MPTLVAFSMI | TVVNEWNQYL | WPFLMAETDN | SATLPIGLTM | LQNNEGVSNW | GPVMAATIMT |
| MLPVLVMFLA | LQEYMIKGLI | SGAVKG | | | |
| > RXA01298 (1-393, translated) 131 residues | | | | | |
| FVWKNLGYSF | VIYLAALQGL | NKDLSEAAPV | DGASAWTRFW | KVTLPQLRPT | TFFLSITVTL |
| NSVQVFDIIH | TMTRGGPLGN | GTTTLVYQVY | TETFTNYRAG | YGATIATILF | LLLLIITVIQ |
| VRYMDKENKQ | K | | | | |
| > RXA01303 (1-1335, translated) 445 residues | | | | | |
| VTQLNTKGVV | LQGWDPEDPE | HWDSKIAWRT | LWITTFSMII | GECVWYLVSA | IAPLLNRIGF |
| DLSAGQLYWL | ASIPGLAGGL | IRLIYMELPP | ILGTRKLVGI | SSGLFLIPMF | GWFLAVQDSS |
| TPYWWLLTLA | ALTGIGGGVF | SGYMPSTGYF | FPKAKSGTAL | GIQAGIGNLG | VSIIQFMGPW |
| VMGFGLLGIG | FLTPQRTIEG | TTVFVHNAAI | VLVPWTILAA | VLSFLFLKDV | PVTANFRQQI |
| DIFGNKNTWI | LSIIYLMTFG | AFAGFAAQFG | LIINNNFGIA | SPMAETYPAE | MLHAGATFAF |
| LGPLIGALVR | AAWGPLCDRF | GGAIWTFVGG | IGMTIATAAA | AIELSRAETP | DDEWPFLWSM |
| LALFFFTGLG | NAGTFKQMPM | ILPKRQAGGV | IGWTGAIGAF | GPEIVGVLLS | FTPTVAFFWG |
| CVVFFIIATA | LTWIYYARPN | APFPG | | | |
| > RXA01323 (1-2265, translated) 755 residues | | | | | |
| MAQTPAKIPA | ALNFIDVDLG | VTGMTCTSCS | ARVERKLNKL | DGVEATVNYA | TESAQVSYDP |
| SKVSPEQLIK | TVEDTGYGAF | TMASAAAESE | EDNAPADSGQ | SRIDAARDHE | AADLKHRVIV |
| SALLSVPVVL | VSMIPALQFN | NWQWAVLTLV | TPIFFWGGSP | FHKATWANLK | RGSFTMNTLV |
| SLGTSAADLW | SLWALFIENA | GHPGMKMEMH | LLPSASTMDE | IYLETVAVVI | TFLLLGRWFE |
| TKAKGQSSEA | LRKLLDMGAK | DAVVLRDGAE | VRVPVNQLKL | GDVFITRPGE | KIATDGEVDE |
| GSSAVDESML | TGESIPVEVT | KGSKVTGATL | NTSGRLMVKV | TRIGADTTLS | QMAKLVTDAQ |
| SKKAPVQRLV | DQISQVFVPV | VIVIATATLI | AHLVFTDAGL | APAFTAAVAV | LIIACPCALG |
| LATPTALLVG | TGRGAQLGLL | IKGPEILEST | KKVDTIVLDK | TGTVTTGTMS | VTDVTAINYS |
| ETEILEFAAA | VESASERPIA | QAIAKAAEHE | QVTDFQNTAG | QEVTGVVRGH | EVRVGRPSST |
| LIDALLHPFQ | HAQKIGGTPV | VVTIDGVDSG | IITVRDTVKD | TSAEAIRGLK | ELGLTPILLT |
| GDNEGAAKSV | AAEVGIDQVI | ANVLPHEKVQ | NVEALQAQGK | NVAMVGDGVN | DAAALAQADL |
| GLAMGAGTDV | AIEASDITLM | NNDLRSAVDA | IRLSRKTLGT | IKGNLFWAFA | YNVALIPVAA |
| IGLLNPMLAG | IAMAFSSVFV | VSNSLRLRGF | KARSN | | |
| > RXA01338 (1-1878, translated) 626 residues | | | | | |
| MLFIRSFDGI | ITVAALVAIA | IHLILWLALD | LDGLAKNWPL | IAIVIVGGIP | LMWDVLKSAI |
| KTRGGADTLA | AVSIITSVLL | GEWLVAAIIV | LMLSGGEALE | EAASRRASGT | LDALARRAPS |
| TAHRLLGATI | LDGTEEIAVE | EITVGDLVAV | LPHELCPVDG | EIVAGHGTMD | ESYLTGEPYV |
| VSKSKGSQAM | SGAVNGDTPL | TIVATKLAHD | SRYAQIVGVL | HEAENNRPEM | RRMADRLGAW |
| YTVIALALGG | LGWIVSGDPV | RFLAVVVVAT | PCPLLIAVPV | AIIGAISLAA | RRGIIVKNPG |
| MLENASGVKT | VMFDKTGTLT | YGRPVITDIH | TAPGVEEDTV | LALAASVERY | SRHPLADAIR |
| EGAKARELHL | PDVVEVSERP | GQGLTGTVGE | HLVRITNRRS | TLEIDPDSKN | YIPVTSSGME |
| SVVLVDDKYA | ALIRLRDEPR | ASASEFIAHL | PKKHKVDKLM | IISGDRASEV | RYLADKVGID |
| EVHAEASPED | KLNIVNRHNE | HGATMFLGDG | INDAPAMAVA | TVGVAMGADS | DVTSEAADAV |
| ILDSSLERLD | DLLHISARMR | RIALQSAGGG | MALSVIGMIL | AVFGFLTPLM | GAIFQEVIDV |
| LAILNSARVA | LPRGAISDFD | TQEKVS | | | |
| > RXA01395 (1-1086, translated) 362 residues | | | | | |
| MAVMAYQPAD | NRYDDMIYRR | VGNSGLKLPA | ISLGLWHNFG | DDKPLSTQRS | IIHRAFDRGV |
| THFDLANNYG | PPAGSAETNF | GRILREDLKS | HRDELIISSK | AGWDMWPGPY | GFGGSRKYLV |
| SSLDQSLTRL | GLDYVDIFYH | HRPDPDTPLE | ETMYALRDIV | ASGKALYVGI | SSYGPELTAE |
| AAEFMAEEGC | PLLIHQPSYS | IINRWVEEPG | DDCENLLQSA | ANNGLGVIAF | SPLAQGLLTD |
| KYLDGIPEGS | RASQGKSXXX | XXLNVNNIDX | VXXXXXXSXX | TGQSFXXKXF | CWVVAQPRKV |
| RRRITVTSAL | IGASSVEQLD | NSLDSLNNLE | FSDAELEAID | EISHDAGINI | WAKATDSKTR |
| EN | | | | | |
| > RXA01411 (1-327, translated) 109 residues | | | | | |
| FIAQVMLGIG | AVTANCVTSV | MMAEVPQEVT | RGTSAGITYN | VTYAIFGGSA | PFISTALVSW |
| TGSPLAPAVY | MIIIALFAFT | ASRFIPETSP | VFVTATPAIK | APKVLVNPG | |
| > RXA01454 (1-267, translated) 89 residues | | | | | |
| MMLIVAFLIA | LVGHYLMGGI | RAGNQMTGQK | SFVSRGARTQ | LAVTAGLWML | VKVAGYWLDR |
| YDLLTKENST | FTGASYTDIN | AQLPAKIIL | | | |
| > RXA01455 (1-462, translated) 154 residues | | | | | |
| VTWIFAIIAL | VILIAPMSVG | FYTDWLWFGE | VDFRGVFSKV | IVTRIVLFVI | FALIAGEVTW |
| LAGYFVTKLR | PDEMSAFDTQ | SPVYQYRQMI | ENSLRRVMVI | IPIEVALLAG | LIGQRSWRTV |
| QMWLNGQDFG | VSDQQFGLDY | GFYAFDLPML | RLIA | | |
| > RXA01625 (1-201, translated) 67 residues | | | | | |
| MAIKNYTVEG | MTCGHCVSSV | KEEVGEVAGV | TAVDVTLETG | AVQVTGEDFT | DEAVKAAVVE |
| AGYKVVA | | | | | |
| > RXA01756 (1-1308, translated) 436 residues | | | | | |
| MKELELGEAR | DVAATLEAMP | IQEVIDQVER | TSITKGAVLL | RLLSKDRSLL | VFDALGPRLQ |
| ADLIGAFQDA | EVLDYEADLD | PDDRVSLLDE | LPASIADELL | RSLDPQEKQV | TELVLGYAKG |
| SVGRWMSPQV | LLLFDDMSVA | EVLDEVRNHA | AEAETIYALP | IVNRARQVMG | VVSLRKLFIA |
| DPTLKVSEIM | VRPVSVLASA | DIEETARWFL | QLDLVAMPVV | DESNMLLGVL | TFDDAQDIVE |
| QADSEDSARS | GGSEPLQQPY | LSTPIRKLVK | SRIVWLLVLA | VSAILTVQVL | DIFEATLVEA |
| VVLALFIPLL | TGTGGNTGNQ | AATTVTRALA | LGDVRKSDVF | RVLGREIRVG | LMLGALLGAV |
| GEVIASLVYG | MPVGTVIGLT | LLAVCTMAAS | VGGVMPIIAK | AIGADPAVFS | NPFISTFCDA |
| TGLIIYFAIA | KLVLGI | | | | |
| > RXA01808 (1-1119, translated) 373 residues | | | | | |
| MRGGAPARTS | KPGFRLEAAE | ALIAEVPAPR | DKVELMAFSK | SRQGRVVIEL | EDATVATPDD |
| RILVEDLTWR | LAPGERIGLV | GVNGSGKTTL | LRTLAGEQPL | QAGKRIEGQT | VKLGWLRQEL |
| DDLDLSRRLI | DCVEDVASYV | MMGDKQVSAS | QLAERLGFSP | KRQRTPVGDL | SGGERRRLQL |
| TRVLMAEPNV | LLLDEPTNDL | DIDTLQELES | LLDGWPGTMV | VISHDRYLIE | RVTDSTWALF |
| GDGKLTNLPG | GIEEYLQRRA | AMAAAEDSGV | LNLGAATQAG | TFSAATEQAA | TSVESSGISS |
| QERHRITKEM | NALERKMGKL | DQQMDKLNQQ | LADAAEAMDT | IKLTELDTKL | RAVQEEHGEL |
| EMQWLELGEE | IEG | | | | |
| > RXA01822 (1-582, translated) 194 residues | | | | | |
| MARQNSNTGG | LRLVLVGIGT | GAFLGAARDE | FMVRADITGA | STVQLWSAGS | LSGRDWNHAL |
| LVLISCAVIV | PALCIIVRRL | RLMEMGDDAA | GALGISVERT | RLIAILLAVL | LVGIATAAAG |
| PIAFIALAAP | QIARALARED | GVLVAASISI | GSGLLVAADC | LEQHVDTELH | TPVGLVTSLL |
| GGVYLMWLLS | RKEA | | | | |
| > RXA01890 (1-720, translated) 240 residues | | | | | |
| MASIVFENVT | RKYSPGARPA | VDKLNLEIAD | GEFLVLVGPS | GCGKSTSLRM | LAGLEPIDEG |
| RLLIDGKDAT | ELRPQDRDIA | MVFQSYALYP | NMTVRDNMGF | ALKNQKVAKA | EIEKRVAEAS |
| RILQLDPYLD | RKPAALSGGQ | RQRVAMGRAI | VREPSVFCMD | EPLSNLDAKL | RVSTRAEISG |
| LQRRMGVTTV | YVTHDQVEAM | TMGDRVAVLL | LGVLQQVDTP | QNLYDYPANA | FVASPIGSLP |
| > RXA01900 (1-1299, translated) 433 residues | | | | | |
| MTTAVDQNSP | PKQQLNKRVL | LGSLSGSVIE | WEDFLVYGTV | AALVFNKMYF | PSGNEFLSTI |
| LAYASFSLTF | FFRPIGGVIF | AHIGDRIGRK | KTLFITLMLM | GGGTVAIGLL | PDYNAIGIWA |
| PILLMFLRIL | QGIGIGGEWG | GALLLAYEYA | PKKQRGLYGA | VPQMGISLGM | LLAAGVISLL |
| TLMPEDQFLT | WGWRIPFVGS | ILLVFIGLFI | RNGLDETPEF | KRIRDSGQQV | KMPLKEVLTK |
| YWPAVLVSIG | AKAAETGPFY | IEGTYIVAYA | TNFLNIRDNI | VLLAVACAAL | VATIWMPLFG |
| SFSDRVNRAV | LYRICASATI | VLIVPYYLVL | NTGEIWALFI | TTVIGFGILW | GSVNAILGTV |
| IAENFAPEVR | YTGATLGYQV | GAALFGGTAP | IIAAWLFEIS | GGQWWPIAVY | VAACCLLSVI |
| ASFFIQRVAH | QEN | | | | |
| > RXA01939 (1-603, translated) 201 residues | | | | | |
| STSGTDLTSL | SHKEIFQMRR | KLQVVEQNPY | GSLDPMYSIY | RCIEEPLTIH | KVGGDRKARE |
| ARVVELLDMV | SMPRSTMRRY | PNELSGGQRQ | RIATARALAL | NPEVIVLDEA | VSALDVLVQN |
| QILTLLAELQ | QELKLTYLFI | THDLAVVRQT | ADDVVVMQKG | RIVEKGRTDD | IFNDPQQHYT |
| RDLINAVPGL | GIELGTGENL | V | | | |
| > RXA01972 (1-594, translated) 198 residues | | | | | |
| VATGLLSAIG | LFIATNIDDI | IVLSLFFARG | AGQKGTTLRI | LAGQYLGFMG | ILAAAVLVTL |
| GAGAFLPAEA | IPYFGLIPLA | LGLWAAWQAW | RSDDDDDDDA | EIAGKKVGVL | TVAGVTFANG |
| GDNIGVYVPV | FLNVDTAAVI | IYCIVFLVLV | AGLVLLAKFV | ATRPPIAEVL | ERWEHVLFPI |
| VLIGLGIFIL | VSGGAFGL | | | | |
| > RXA01986 (1-618, translated) 206 residues | | | | | |
| MASTFIQADS | PEKSKKLPPL | TEGPYRKRLE | YVALVATFGG | LLFGYDTGVI | NGALNPMTRE |
| LGLTAFTEGV | VTSSLLFGAA | AGAMEFGRIS | DNWGRRKTII | SLAVAFFVGT | MICVFAPSFA |
| VMVVGRVLLG | LAVGGASTVV | PVYLAELAPE | EIRGSLAGRN | ELMIVVGQLA | AFVINAIIGN |
| VFGHHDGVWR | YMLAIAAIPA | IALFFG | | | |
| > RXA01995 (1-654, translated) 218 residues | | | | | |
| MDIRQTINDT | AMSRYQWFIV | FIAVLLNALD | GFDVLAMSFT | ANAVTEEFGL | SGSQLGVLLS |
| SALFGMTAGS | LLFGPIGDRF | GRKNALMIAL | LFNVVGLVLS | ATAQSAGQLG | VWRLITGIGI |
| GGILACITVV | ISEFSNNKNR | GMAMSIYAAG | YGIGASLGGF | GAAQLIPTFG | WRSVFAAGAI |
| ATGIATIATF | FFLPESVDWL | STRRPAGARD | KINYIARR | | |
| > RXA02033 (1-789, translated) 263 residues | | | | | |
| MPLSGKIGGF | IVAVVFVLAA | LSFIWTPFDP | VQAFPQERLE | GSSLRHLLGT | DRYGRDVLSQ |
| IMVGSRVTLL | VGIIAVAIAA | LIGTPLGIAA | GMRRGMVETF | VMRGADLMLA | FPALLLAIIS |
| GAVFGASTWS | AMVAIGIAGI | PSFARVARAG | TLQVTSQDFI | AAARLSKVSS | ARIALRHILP |
| NITSMLIVQA | SVAFALAILA | EAALSFLGLG | TTPPDPSWGR | MLQTAQASIG | VTPMLAVWPG |
| AAIALTVLGF | NLFGDGLRDA | IDP | | | |
| > RXA02034 (1-966, translated) 322 residues | | | | | |
| VSKTIAWTVL | RYTLTFVIAS | IIIFVLIRVI | PGDPAAVALG | ITATPEAIAA | LQSQLGTDQP |
| LFQQYFSWIG | GMLTGDFGTS | LSSGQDLSPI | IFDRLQVSLI | LVGCSIVLSL | LIAIPLGVLS |
| ARRGGVIISG | ISQIGIAIPS | FLAGILLVAV | FAVGLGWLPA | NGWIPPSENF | GGFLARLILP |
| VLALTAVQAA | ILTRYVRSAV | MDVMGQDFMR | TARSKGMSFN | RALIIHGLRN | AALPVLTVTG |
| LQLTTLVIGA | VVIEQVFVIP | GIGSMLLESV | SNRDLIAVQS | IVMLLVAFTL | LVNLVVDLLY |
| QVVDPRVGAV | GVASTKVPGS | VA | | | |
| > RXA02035 (1-1509, translated) 503 residues | | | | | |
| MKITRGLLPS | LLLASTIVVS | SCSAGSTAYQ | QPPAVDQSSI | VIATTAAAAS | LDFTNAAGAA |
| IPQAMMSNIY | EGLVRIDAEG | EIQPLLATSW | DISDDRTEYI | FHLREGVLFS | NGDPFNADSA |
| KFSIDRVKTD | WTNGLKSGMD | VVESTEVIDD | HTLKVSLVRP | SNQWLWSMGT | AIGAMMTEGG |
| VDKLATDPVG | TGPYTVTHWA | PGRAIGFGAR | ADYWGQKPLN | DAATIRYFSD | ATASTNALQS |
| GDVDVIWAMQ | APEQLATLQE | YTVEVGTTNG | EMLLSMNNQR | APFDDVRVRQ | AVMFAIDRQA |
| VIDTALEGYG | TDTGGVPVPP | TDPWYEKSTM | YPYDPDRARA | LLEEAGAEGT | RITMSIPSLP |
| YAQAASEILY | SQLRDVGFDP | VIESTEFPAV | WLAQVMGQKD | YDMSLIAHVE | PRDIPTLFSP |
| NYYLGFDDTE | TQALLAEADS | SANEVELMQQ | AVDRIMEQAV | ADNLMNVANI | VVMSPEITGI |
| DPNVVSGALE | LSLIGRKESG | VAQ | | | |
| > RXA02062 (1-1170, translated) 390 residues | | | | | |
| MRVGMMTREY | PPEVYGGAGV | HVTELTRFMR | EIAEVDVHCM | GAPRDMEGVF | VHGVDPALES |
| ANPAIKTLST | GLRMAEAANN | VDVVHSHTWY | AGLGGHLAAR | LHGIPHVATA | HSLEPDRPWK |
| REQLGGGYDV | SSWSEKNAME | YADAVIAVSA | RMKDSILAAY | PRIEPDNVRV | VLNGIDTELW |
| QPRPTFDDAE | DSVLRSLGVD | PQRPIVAFVG | RITRQKGVEH | LIKAAALFDE | SVQLVLCAGA |
| PDTPEIAART | TALVEELQAK | REGIFWVQDM | LGKDKIQEIL | TAADTFVCPS | IYEPLGIVNL |
| EAMACNTAVV | ASDVGGIPEV | VVDGTTGALV | HYDENDVETF | ERDIAEAVNK | MVADRETAAK |
| FGLAGRERAI | NDFSWATIAQ | QTIDVYKSLM | | | |
| > RXA02068 (1-1119, translated) 373 residues | | | | | |
| IFVPMLRIAA | IEPKDITLVT | GSVSLRTFRV | RTGELQVMGD | IVGAKVHTDD | PELQQFHGRA |
| VETADVELEL | SRTRDWIITR | VAVLGERPKF | GRRPVLHTVP | WSHIHGITAG | GVGESNHTAE |
| LIAGFEDMRP | ADVAKQLYQL | PTAQRTEVTE | ELDDEKLADI | LQELSEDRQA | ELIEELDIER |
| AADILEEMDP | DDAADLLGEL | PDDKADVLLD | LMDPEESAPV | RRLMDFSPDT | VGALMTPEPL |
| IMDPSTTVAE | ALAMARNPDL | PTSLASLIFV | VRPPTATPTG | KYLGCVHLQK | LLREPPSSLI |
| GGILDPDLPP | LYADDEQETA | ARFFATYNLV | CGPVLDENRH | LLGAVAVDDL | LDHMLPEDWR |
| DAGIRPGKEH | THG | | | | |
| > RXA02079 (1-615, translated) 205 residues | | | | | |
| MSEAFDATKV | RKAVLTVALL | NFAYFFVEFF | IALSAGSVSL | LADSVDFLED | TSINLLIFIA |
| LGWPLARRAV | MGKLMAIVIL | APAAFAAWAA | IQRFSAPQAP | EVFPIIVASL | GAVVINGASA |
| IIISRVRQHG | GSLGQAAFLS | ARNDVLINIA | IIMMALITAW | TTSGWPDLIL | GCFIILLALH |
| AAHEVWEVSE | EERLASKALA | GEAID | | | |
| > RXA02096 (1-1317, translated) 439 residues | | | | | |
| MGLDVSDEQI | EHAARLAQAH | DFIDRLPNKY | EEVIGERGLT | LSGGQRQRIA | LARAFLARPK |
| VLVLDDATSA | IDASTEDRIF | QALREELHDV | TILIIAHRHS | TLELGDRVGL | VEDGRVTALG |
| PLSEMRDHAR | FSHLMALDFQ | DSHDPEFTLD | NGSLPSQEQL | WPEVSTEKQY | KILAPAPGRG |
| RGMSMPATPE | LLAQIEALPA | ATEETRVDAG | RLRTSTSGFK | LLSLFKQVRW | LVVAVIALLL |
| VGVAADLAFP | TLMRAAIDNG | VQAQSTSTLW | WIAIAGSVVV | LLSWAAAAIN | TIITARTGER |
| LLYGLRLRSF | VHLLRLSMSY | FERTMSGRIM | TRMTTDIDNL | SSFLQSGLAQ | TVVSVGTLIG |
| VVTMLAITDA | QLALVALSVV | PIIIVLTLIF | RRISSRLYTA | SREQASQVNA | VFHESIAGLR |
| TAQMHRMEDQ | VEDNYAGEA | | | | |
| > RXA02119 (1-1641, translated) 547 residues | | | | | |
| MTETLVVNGL | AGGYGHRTLF | NDVNLTVAAG | DVVGVVGVNG | AGKSTELKIL | AGVEKPLAGT |
| IALSPADAFV | GYLPQEHTRT | SGETIAVYIA | RRTGCQAATT | AMDDTAEAFG | ADPDNAALAD |
| AYAEALDRWM | ASGAADLDER | IPIVLADLGF | ELPTSTLMEG | LSGGQAARVG | LAALLLSRFD |
| IVLLDEPTND | LDLDGLEQLE | NEVQGLRGGV | VFVSHDREFL | SRCVTTVLEL | DLHQNSHHVY |
| GGGYDSYLEE | RAVLRQHARD | QYEEFAEKKK | DLVARARTQR | EWSSHGVRNA | IKRAPDNDKL |
| RKKAAAESSE | KQAQKVRQME | SRIARLEEVE | EPRKEWKLQF | SVGKASRSSS | VVSTLNDASF |
| TQGDFTLGPV | SIQVNAGDRI | GITGPNGAGK | STLLRGLLGN | QEPTSGTATM | GTSVAIGEID |
| QARALLDPQL | PLISAFEKHV | PDLPISEVRT | LLAKFGLNDN | HVERDVEKLS | PGERTRAGLA |
| LLQVRGVNVL | VLDEPTNHLD | LEAIEQLEQA | LASYDGVLLL | VTHDRRMLDA | VQTNRRWHVE |
| AGEVREL | | | | | |
| > RXA02220 (1-2676, translated) 892 residues | | | | | |
| VSSPLPAAVT | SKPAHALSSD | EVLENLGVQD | TGLTSAEATQ | RLEANGPNEL | PQTPPETVWQ |
| RLFRQVNDPM | IYVLIAAAVL | TAELGHWTDT | IVIGAVVIIN | MMVGFIQEGK | AADALASIRN |
| MLSPESAALR | DGVFHKIDAA | ELVVGDVVKL | SAGDKVPADL | RMLAATNLHI | EESALTGEAE |
| AVVKGTDPVE | ADAGIGDRTS | MAFSGTLVLT | GSGTGVVTAT | GAGTEIGHIT | TMLADVDSVD |
| TPLTRSMKKF | SSALAIVCVF | LAILMLVVAG | LVHHTPLEEL | ILSAIGFAVA | AIPEGLPAVI |
| AITLALGVQK | MAARNAITRR | LNSVETLGSV | TTICTDKTGT | LTRNEMTVRA | IATGTSLYDV |
| SGAGYEPLGE | IRLKDGEQVS | KQDFPDLYAM | ALVAANVNDA | EIYQEDGMWR | LSGEPTDGGI |
| RAFAMKTNAE | ILTRTAEVPF | DSAYKYMATL | HTIDGANTML | VKGAPDRLLD | RSAQQRNGEP |
| LDRPYWEQLI | EDLASQGLRV | LAAAYKELPH | STSTITPEDV | DQGELTFLGL | YGIMDPPREE |
| VIEAMKVVQS | AGVRVRMITG | DHSSTARAIA | REVGIRGQNV | LTGAEITAAT | DEELQGLVDN |
| ADLFVRTSPE | HKLRVVRALQ | ANGEVASMTG | DGVNDAPALK | QADVGVAMGI | KGTEATKDAA |
| DIVLADDNFA | TIAGAVEMGR | TIYDNLRKAV | VFMLPTNGAQ | GLVIFIAMLL | GWELPITALQ |
| VLWINLITAI | TLSLALSFEP | AEPGIMNRKP | RNPKSGLIDA | PSVLRIVYVS | LLLGGATFWA |
| FLGARDAGID | IDTARTIAVT | TLAVSQVFYL | LSSRYFEVSA | LRKELFTTNP | ISWLCIALML |
| ILQLAFVYLP | FMQSTFDTAA | LTLRDWVMPL | VFGVVVFAVV | ETEKFIRRLK | AS |
| > RXA02222 (1-375, translated) 125 residues | | | | | |
| LGRPPPGDVH | TLLDDIGAEE | SEADKVPIEW | QNALTKADRY | ANRQHMSQAR | LYRQLTSDVG |
| EGFTEEAAQY | AIENVNADWN | ANALVKARNY | QERQANSVDR | IYRQLTSEHG | EGFTPEQAQY |
| AIDNL | | | | | |
| > RXA02312 (1-1359, translated) 453 residues | | | | | |
| LSNRHLQLIA | IGGAIGTGLF | MGSGKTISVA | GPSVILVYAI | IGFMLFFVMR | AMGELLLANL |
| NYKSLRDAVS | DILGPGAGFV | TGWTYWFCWI | ATGMADIVAI | TGYTQYWWPE | IPLWLPGVLT |
| IALLFALNLA | AVRLFGEMEF | WFAIIKIVAI | VSLIVVGLFM | VVTAFESPNG | TTAQFNNLIE |
| HGGFFPNGIT | GFLAGFQIAI | FAFVGIELAG | TAAAETENPT | KTLPRAINSI | PIRIVVFYVL |
| ALAVIMMVTP | WDQVRADNSP | FVQMFALAGI | PAAAGIINFV | VITSAASSAN | SGIFSTSRML |
| YGLSLEGAAP | KRWSRLSKNL | VPARGLTFSV | ICLIPAVGLL | YAGGTVIEAF | TLITTVSSVL |
| FMVVWSYILV | AYIVYRRNSP | ELHKKSIFKM | PGGVVMAVVV | LVFFAAMLVV | LSLEPDTRAA |
| LIATPVWFII | LGIGWLSIGG | AKGAKHRSQI | TSH | | |
| > RXA02313 (1-1221, translated) 407 residues | | | | | |
| MRVAIVAESF | LPNVNGVTNS | VLRVLEHLKA | NGHDALVIAP | GARDFEEEIG | HYLGFEIVRV |
| PTVRVPLIDS | LPIGVPLPSV | TSVLREYNPD | IIHLASPFVL | GGAAAFAARQ | LRIPAIAIYQ |
| TDVAGFSQRY | HLAPLATASW | EWIKTVHNMC | QRTLAPSSMS | IDELRDHGIN | DIFHWARGVD |
| SKREHPGKRS | VALRKSWDPS | GAKKIVGFVG | RLASEKGVER | LAGLSGRSDI | QLVIVGDGPE |
| AKYLQEMMPD | AIFTGALGGE | ELATTYASLD | LFVHPGEFET | FCQAIQEAQA | SGVPTIGPRA |
| GGPIDLINEG | VNGLLLDVVD | FKETLPAAAE | WILDDSRHSE | MCAAAWEGVK | DKTWEALCTQ |
| LLQHYADVIA | LSQRIPLTFF | GPSAEVAKLP | LWVARALGVR | TRISIEA | |
| > RXA02344 (1-678, translated) 226 residues | | | | | |
| MLNRMKSARP | KSVAPKSGQA | LLTLGALGVV | EGDIGTSPLY | SLHTAFSMQH | NKVEVTQENV |
| YGIISMVLWT | ITLIVTVKYV | MLVTRADNQG | QGGILALVAL | LKNRGHWGKF | VAVAGMLGAA |
| LFYGDVVITP | AISVLSATEG | LTVISPSFER | FILPVSLAVL | IAIFAIQPLG | TEKVGKAEGP |
| IMLLWFVTLA | GLGIPQIIGH | PEILQSLSPH | WALRLIVAEP | FQAEVL | |
| > RXA02348 (1-1134, translated) 378 residues | | | | | |
| PIRVAWFCVV | MPALILTYLG | QGALVINQPE | AVRNPMFYLA | PEGLRIPLVI | LATIATVIAS |
| QAVISGAYSL | TKQAVNLKLL | PRMVIRHTSR | KEEGQIYMPL | VNGLLEVSVM | VVVLVFRSSE |
| SLASAYGLAV | TGTLVLVSVL | YLIYVHTTWW | KTALFIVLIG | IPEVLLFASN | TTKIHDGGWL |
| PLLIAAVLIV | VMRTWEWGSD | RVNQERAELE | LPMDKFLEKL | DQPHNIGLRK | VAEVAVEPHG |
| TSDTVPLSLV | RCVKDLKLLY | REIVIVRIVQ | EHVPHVPPEE | RAEMEVLHHA | PIRVVRVDLH |
| LGYFDEQNLP | EHLHAIDPTW | DNATYFLSAL | TLRSRLPGKI | AGWRDRLYLS | MERNQASRTE |
| SFKLQPSKTI | TVGTELHL | | | | |
| > RXA02353 (1-468, translated) 156 residues | | | | | |
| MALLILAGLQ | MIPKETYEAA | RVDGATAWQQ | FTKITLPLVR | PALMVAVLFR | TLDALRMYDL |
| PVIMISSSSN | SPTAVISQLV | VEDMRQNNFN | SASALSTLIF | LLIFFVAFIM | IRFLGADVSG |
| QRGIKKKKLG | GTKDEKPTAK | DAVVKADSAV | KEAAKP | | |
| > RXA02354 (1-789, translated) 263 residues | | | | | |
| MTKRTKGLIL | NYAGVVFILF | WGLAPEYWMV | ITALRDSKHT | FDTTPWPTHV | TLDNFRDALA |
| TDKGNNFLAA | IGNSLVISVT | TTAIAVLVGV | FTAYALARLE | FPGKGIVTGI | ILAASMFPGI |
| ALVTPLFQLF | GDLNWIGTYQ | ALIIPNISFA | LPLTIYTLVS | FFRQLPWELE | ESARVDGATR |
| GQAFRMILLP | LAAPALFTTA | ILAFIATWNE | FMLARQLSNT | STEPVTVAIA | RFTGPSSFEY |
| PYASVMAAGA | LVTIPLIIMV | LIF | | | |
| > RXA02394 (1-1311, translated) 437 residues | | | | | |
| MLSPAAVAAL | ILVIGIVVLI | IASVPVAIAI | GLPSLFAAMA | VLGPENAAQA | VAQRMFTGTN |
| SFTLLAIPFF | VLAGLLMNSG | GIATRLIDAA | KVLVGRMPAS | MANTNIAANG | LFGAVSGAAV |
| ASASAVGTVM | TPKMKEEGYS | RAYAAAVNVA | SAPAGMLIPP | SNTFIVYSLV | SSTSIAALFM |
| AGVGPGLLWI | LACVIVGTWL | ARKENYKREQ | IHPTFKQSLV | VLWRALPSLL | MIVIVVGGIL |
| LGWFTPTESA | AIAVVYCLVL | GFIYRTIKVG | DLADILLKAT | RTTSIVMLLI | AVSAALSWVM |
| AFAKIPQMIS | DALLSVSDSK | VVILLIMMFI | LLLIGTVMDP | TPAILIFVPI | FLPVVTELGV |
| DPVHFGAMVV | MNLSVGVITP | PVGNVLFVGS | QVAGLRVETV | IRRLWPYLIA | ITVALFVVVF |
| VPQISIWLPT | TMGLMGG | | | | |
| > RXA02402 (1-744, translated) 248 residues | | | | | |
| VSKTEEGRSA | AIIIYAFPTF | ILLGATIAFI | FPEPFIPLTN | YTNIFLTIIM | FTMGLTLTVP |
| DFQMVLKRPL | PILIGVVAQF | VIMPFLAIVV | AKMFNLNPAL | AVGLLMLGSV | PGGTSSNVIA |
| FLARGDVALS | VTMTSVSTIV | SPIMTPFLML | MLAGTETAVD | GGGMAWTLVQ | TVLLPVIIGL |
| VLRVFLNKWI | DKILPILPYL | SILGIGGVVF | GAVAANAERL | VSVGLIVFVA | VIVHNVLGYV |
| VGYLTGRV | | | | | |
| > RXA02422 (1-435, translated) 145 residues | | | | | |
| VSTLISEPEV | DKLRKRAKRS | RRTEWWLAAA | LLAPNLLLLA | IFTYRPLLDN | FRLSFFNWNI |
| SSPTSTFIGF | DNYVEFFTRS | DTLQVVLNTV | IFTACAVIGS | MVLGLLLAML | LDQKLFGRNF |
| VRSMVFAPFV | ISGAAIGGAF | QFVFD | | | |
| > RXA02438 (1-759, translated) 253 residues | | | | | |
| MTDLIQLREV | SKKYGAFQAL | NDINLNVRAG | EVTCVLGDNG | AGKSTLIKIL | SGLHPATSGE |
| VIVAGDVVNF | GSPRDALDAG | IATVYQDLAV | VGQMSVWRNF | FLGQELTGRF | GVLKQEEMRR |
| ITDEQLREMG | IELRDVDVPV | ASLSGGQRQV | VAIARAIYFG | ARVLILDEPT | AALGVKQSGM |
| VLRFIAAARD | RGIGVIFITH | NPHHAYLVGD | HFILLNLGKQ | VMDKSRAEVE | LEELTLAMSG |
| GGELDSLSHE | LKR | | | | |
| > RXA02439 (1-1023, translated) 341 residues | | | | | |
| MTKIKSGEAS | TSIVERALKR | PELTSLLGAV | LVFTLFMVVA | PAFRSWDSMA | TVLYASSTIG |
| IMAVAVGLLM | IADEFDLSTG | VAVTTAALAA | SMFSYNLWLN | TWVGALIALV | ISLAIGFFNG |
| FLVVKTKIAS | ELITLATFLM | LQGINLAVTK | LISGTVATPT | IADMEGFPSA | RAVFASSIPI |
| FGVNIRITVF | WWLLFVIVGT | FVLEKTRIGN | WIFAVGGDEE | AARAVGVPVR | GVKIGLFMFV |
| GFAAWFVGMH | NLFLFDSIQA | GQGVGNEELY | IIAAVIGGIS | MTGGRGTVVG | TMIGALIEGM |
| TNQGIVYAGW | NPDWEMFFLG | GTLLLAVLLN | HRFERENKER | S | |
| > RXA02441 (1-657, translated) 219 residues | | | | | |
| MAELSVRNLT | CTYGNHIALN | NITARFPTGK | ITALIGSNGS | GKSTLLETLA | GMLAPRSGSI |
| NNLVPEIAFV | PQRSHVSHNL | PITIRQTVSM | GRWSAKKNWQ | RLTAADCNIV | DSCLDRLEIS |
| GLADRPLGEV | SGGQRQRALI | AQGLAQQAPL | LLLDEPLAAV | DSHAASLIED | VINQQRNQGT |
| TIILATHDLD | QAHQADQIIA | LEKGIIKPQR | KATESIKKR | | |
| > RXA02442 (1-849, translated) 283 residues | | | | | |
| MKFFTDALIV | PFDVSFISRA | LVAGCLAAIL | CSLIGTWVIL | RRLTFFGDAM | SHGLLPGVAT |
| ASLLGGNLMF | GAAISALIMS | AGVVWTSRKS | SLSQDVSIGL | QFITMLSLGV | VIVSHSDSHA |
| VDLTSFLFGD | ILGVRPSDIF | IIAIATVLGG | LTIFLEHRQF | TALAFDERKA | HTLGLNPRFA |
| HLLMLALIAL | ATVVSEQVVG | TLLVFGLLIG | PPATAALLVQ | DKASISLIMI | VASLLGCAEI |
| YLGLLISWHA | STAAGATITL | LSAAIFFATL | LTKSAISRLN | FTA | |
| > RXA02447 (1-270, translated) 90 residues | | | | | |
| WVWLAEIFPV | RMKGIGTGIS | VFCGWGINGV | LALFFPALVS | GVGITFSFLI | FAVVGVIALA |
| FVTKEVPETR | GRSLEELDHA | AFTGQIFKKA | | | |
| > RXA02451 (1-1524, translated) 508 residues | | | | | |
| MNTDTTQDGV | SPEPSDPHLG | SEVAETHREK | KFFGQPWGLA | NLFGVEMWER | FSFYGMQSIL |
| AFYLYYSVTD | GGLGMNQTAA | LSIVGAYGGF | VYMTSLVASF | IADRVLGSER | TLFYSAIIVM |
| LGHIALALIP | GYTGLSIGLV | LIGLGSGGVK | TAAQVVLGQL | YSRTDTRRDA | GFSIFYMGVN |
| LGGLFGPLIT | NALWGWGGFH | WGFGIAAVGM | ALGLIQYVAM | RKTTIGAAGH | TVPNPLPKNE |
| YARWIIGAVV | VVAAVVALIA | TGIIKLEWLS | NITAAIALIA | AIALLAQMYV | SPLTTAAEKS |
| RLLGFIPMFI | GGVLFFAIFQ | TQFTVLAVYS | DTRLDRNFFG | IDLPPGLINS | FNPIFIIIFS |
| GIFATLWTKL | GAKQWSTAVK | FGVANIVIGC | ALFFFLPFAG | GAENSTPMAL | IIWVYFLFTI |
| AELLLSPVGN | SLATKVAPEA | FQSRMFAVWL | MAVSMGTSLS | GTLGGYYDPT | DAGSEKVFFI |
| TVGVAAIVLG | AIVIAAKGWV | LKKFIDVR | | | |
| > RXA02491 (1-1254, translated) 418 residues | | | | | |
| MRVAMISMHT | SPLQQPGTGD | SGGMNVYILS | TATELAKQGI | EVDIYTRATR | PSQGEIVRVA |
| ENLRVINIAA | GPYEGLSKEE | LPTQLAAFTG | GMLSFTRREK | VTYDLIHSHY | WLSGQVGWLL |
| RDLWRIPLIH | TAHTLAAVKN | SYRDDSDTPE | SEARRICEQQ | LVDNADVLAV | NTQEEMQDLM |
| HHYDADPDRI | SVVSPGADVE | LYSPGNDRAT | ERSRRELGIP | LHTKVVAFVG | RLQPFKGPQV |
| LIKAVAALFD | RDPDRNLRVI | ICGGPSGPNA | TPDTYRHMAE | ELGVEKRIRF | LDPRPPSELV |
| AVYRAADIVA | VPSFNESFGL | VAMEAQASGT | PVIAARVGGL | PIAVAEGETG | LLVDGHSPHA |
| WADALATLLD | DDETRIRMGE | DAVEHARTFS | WAATAAQLSS | LYNDAIANEN | VDGETHHG |
| > RXA02507 (1-1401, translated) 467 residues | | | | | |
| MSEQLQGVTH | SESTPGKTPK | RAALSSWIGS | ALEYYDFAVY | GTAAALVLNH | LFFPADTSPG |
| IAILAAMGTV | GVAYVVRPLG | ALIMGPLGDR | YGRKFVLMLC | LFLIGASTFA | VGCLPTFDQV |
| GYLAPALLVL | CRVIQGLSAS | GEQSSAISVS | LEHADERHRA | FTASWTLHGT | QFGTLLATGV |
| FIPFTLFLSE | DALMSWGWRV | PFWLSAAVVL | VAFLIRRGLE | EPPAFRENKE | AVAGAASPLA |
| MTLRYHKAAV | ARVAIAAMIN | SVNIVFTVWA | LSFATNIVGL | DRSTVLLVPV | VANLVALIAI |
| PLSGMLADRI | GRRPVFIMGA | IGGGLAMNGY | LGAIYSGNWT | MIFFMGVLMS | GLLYSMGNAV |
| WPAFYAEMFP | TSVRVTGLAL | GTQIGFAVSG | GFVPVIASAL | AGDQGDQWMK | VSIFVGVVCV |
| ISALVAMTAK | ETKALTLDEI | DALHTAGGEA | ADLAAASKAS | EAQLAAQ | |
| > RXA02515 (1-756, translated) 252 residues | | | | | |
| MSTLEIRNLH | AQVLPSDESA | EPKEILKGVN | LTINSGEIHA | IMGPNGSGKS | TLAYTLGGHP |
| RYEVTAGEVL | LDGENILEME | VDERARAGLF | LAMQYPTEIP | GVSVANELRS | AATAIRGEAP |
| KLREWVKEVR | TAQEALAIDP | EFSNRSVNEG | FSGGEKKRHE | VLQLDLLKPK | FAIMDETDSG |
| LDVDALRIVS | EGINSYKQET | EGGILMITHY | KRILNYVKPD | FIHVFANGQI | VTTGGAELAD |
| KLEADGYDQF | IK | | | | |
| > RXA02562 (1-720, translated) 240 residues | | | | | |
| MFLTKVSLLD | HPESLPGYLS | SLAIVEYLHE | QPLEFRAPIT | VITGENGVGK | STLVEALAVG |
| MRLNPSGGSR | HANFGREGDI | VSSLHQSLKL | VRRENPRDAF | FFRGETMYNV | ASYYEELMGE |
| KNMHDLHKMS | HGESVFAVID | RRFNNQGFFV | LDEPEAGLSM | LRQLELLGKL | GNLARGGAQI |
| IMATHSPILL | AIPGAEILEI | TSSGVAKVNF | EDAEAVRAAR | EFVADPRGTA | AFLTAEEDHQ |
| > RXA02595 (1-651, translated) 217 residues | | | | | |
| VIVVAMASIM | ACLKAARLNN | PMKILLLCWR | DTTHPQGGGS | ERYLERVGEF | LADQGHEVVF |
| RTAGHTDAPR | RSFRDGVRYS | RSGGKESVYP | KAWVAMMLGR | VGIGTFSKVD | VVVDTQNGIP |
| FFGKFFSGKP | TVLLTHHCHK | EQWPVVGRVL | AKVGWLIESQ | IAPRAYKTAP | YVTVSEPSAE |
| ELIALGVDQQ | RIHIVRNGVD | PVPLHTPKLD | RDGQHAV | | |
| > RXA02597 (1-1788, translated) 596 residues | | | | | |
| LPEQDLTTLA | NDWLQAFEKA | TASSSPDEAA | TAVVQLFEDE | GYWRDLLAFT | WNLTTAEGAD |
| EIAEMIRNTW | PSSIFRNVEL | KGEPADEGDG | VTRVHFSCES | ADFKCTGIVR | LRNGKAWTLL |
| TSARELLEHP | EPKGRNREMG | VVHGQNEDTR | NWTDRKNDRQ | AALGVTEQPY | TLIIGGGQGG |
| IALGARLKRL | GVPALIIDKA | SRPGDQWRSR | YHSLCLHDPV | WYDHLPYIPF | PDHWPVFTPK |
| DKMGDWLEHY | VGIMDLDYWT | NTECLRASYN | EDTKQWDVTV | NRDGAESTLH | PTQLVMATGM |
| SGSPNKPTLP | GQDKFQGEIR | HSSEHPGGDV | DRDKNVVVLG | ANNSAHDICA | DLYSNGAKPV |
| MIQRSSTHIV | RSDSLMREVF | GPLYSEDAVE | AGIDTDTADL | LFASWPYKVL | PGVQKQAFDK |
| IREDDKEFYD | KLENAGFLLD | FGDDDSGLFL | KYLRRGSGYY | IDVGASELVA | DGKIPVRSNV |
| SIEDVKENSV | VLTDGTELPA | DVIVLATGYG | NMNNWVAQLV | DQETADKVGP | CWGLGSETTK |
| DPGPWEGELR | NMWKPTNVDS | LWFHGGNLHQ | SRHYSRYLSM | QLKARYEGMN | TPVYSK |
| > RXA02605 (1-495, translated) 165 residues | | | | | |
| VACPWAGTAA | LNLAAKHPDQ | FRQAMSWSGY | LNTTAPGMQT | LLRVAMLDTG | GFNVNANYGS |
| IINPRRFEND | PFWNMGGLAN | TDVYISAASG | LWSPQDDGVR | VDHRLTGSVL | EFVAMTSTRI |
| WEAKARLQGL | NPTADYPMYG | IHGWAQFNSQ | LERTQGRVLD | VMNAW | |
| > RXA02614 (1-729, translated) 243 residues | | | | | |
| MTATLSLKPA | ATVRGLRKSY | GTKEVLQGID | LTINCGEVTA | LIGRSGSGKS | TILRVLAGLS |
| KEHSGSVEIS | GNPAVAFQEP | RLLPWKTVLD | NVTFGLNRTD | ISWSEAQERA | SALLAEVKLP |
| DSDAAWPLTL | SGGQAQRVSL | ARALISEPEL | LLLDEPFGAL | DALTRLTAQD | LLLKTVNTRN |
| LGVLLVTHDV | SEAIALADHV | LLLDDGAITH | SLTVDIPGDR | RTHPSFASYT | AQLLEWLEIT |
| TPA | | | | | |
| > RXA02616 (1-711, translated) 237 residues | | | | | |
| LQKHTRGGKH | RKQTTSPVTK | GGVAFVAVAT | GAVSTAGAGG | AVAAQASNQP | VEVNFELTAN |
| DTTDLVAGSS | APQILSIAEF | KPVVNLGDQI | VKTIQYNADR | IQADLDARGP | SVVRPAEGSY |
| TSGFGARWGT | NHNGVDIANA | IGTPILAAMD | GTVIDAGPAS | GFGNWVRLQH | EDGTITVYGH |
| METVEVTVGQ | TVKAGERIAG | MGSRGFSTGS | HLHFEVYPAG | GGAVDPAPWL | AERGITL |
| > RXA02627 (1-843, translated) 281 residues | | | | | |
| DVTVESQPER | VVALGWGDAE | AALEFGVQPV | GASDWLAFGG | EGVGPWIEDS | AYDEAPEIIG |
| TMEPEYEKIA | ALEPDLTLDV | RSSGDQERYD | KLSSIALTIG | VPEGGDSYLT | PRAEQVTMIA |
| TALGQAERGE | EVNAEYEQLT | ADIRAAHPGW | PEKTAAAVSA | TATSWGAYIK | GSNRVDTLLD |
| LGFQENPELA | KQQPGDTGFS | IKFSEETFGV | VDSDLVVGFA | IGMTPEEMAE | QVPWQMLTAT |
| RDGRSFVMPR | EISNAFSLGS | PQSTRFALDA | LVPLLEEHAG | E | |
| > RXA02628 (1-405, translated) 135 residues | | | | | |
| MLEGFRDFVL | RGNVIELAVA | VVTGTAFTAI | VTAFSESIIN | PLIASIGSTE | VEGLGFHIRA |
| GNAATFVDFG | AVITAAINFL | IIAAIVYFVL | VAPMNKLSET | LAKRKGVEED | ETPASIEAEL |
| LTEIRDLLQE | QKRLQ | | | | |
| > RXA02650 (1-579, translated) 193 residues | | | | | |
| MVNVTSKDAG | ANVTPMSKKE | KRTTVKQVVA | LMAAIVVVIA | SLDQIVKQIM | LSWLEPGVPV |
| PIIGDWFRFY | LLENPGAAFS | MGGENSTWIF | TTIQLSFVIG | IAIYAPRIKH | KWIAAGLALV |
| AGGALGNVLD | RLFRDPSFFF | GHVVDYISVG | NFAVFNIADA | SISCGVVVFL | IGMFLEDREN |
| AQHAKATDEK | DEA | | | | |
| > RXA02660 (1-639, translated) 213 residues | | | | | |
| MIIGVTLLVF | IVMSFSPADP | ARLALGESAS | PEALEAYREA | NGLNDPMMVR | YFDFILGMLK |
| GDLGTSSGGV | AVTDIVARAF | PITLQLTFWG | LIIAVVVALI | LGVIAALYRD | RWPDQLIRVV |
| SIAALATPSF | WLAILLIQWL | GTIPGAWGFF | PALVTRWVPF | SEDPATYFNN | IALQRLRWQS |
| PLQVLWPALF | VPPWWKNWTR | TTSAQQSVQD | PQN | | |
| > RXA02661 (1-219, translated) 73 residues | | | | | |
| VIGLRVGSLM | GGAVIIEIIF | NIQAMGQLIL | DGVTRNDVYL | VQGVTLTVAI | AFIIVNIAVD |
| LLYVLVNPRI | RSI | | | | |
| > RXA02663 (1-1395, translated) 465 residues | | | | | |
| MAPILVFATV | LVADAIVFEA | SLSFINAGVK | PPSPSWGNIL | ADGKALLLSG | AWWPTFFPGL |
| MILLTVLCLN | ILSEGLTDTL | ASPKPKPVSA | SAKKALKKEE | SGEKEGSGIV | LGHTTREEAN |
| ASLLASLAAL | STSENNSNNR | LIFDGNPTPL | LEVRDLKISF | PNAHGDINIV | DGVNFTVAPG |
| QTMGLVGESG | CGKSITAMSI | MGLLPPTAKI | EGEILFDGKN | LLDLKPDELN | ALRGHEIAMI |
| YQDALSSLNP | SMLISAQMKQ | LTRRGGKRSA | EELLELVGLD | PKRTLQSYPH | ELSGGQRQRV |
| LIAMALTRNP | RLLIADEPTT | ALDVTVQQQV | VDLLNELREK | LGFAMIFVSH | DLALVARLVH |
| KLTVMYAGQV | VEQGTTREIL | IDPRHEYTRG | LLGSVLSIEA | GVDRLYQVPG | TVPSPKEFVA |
| GDRFAPRSEF | PELGLDQKPV | LRPITGTEHA | YAATDELLAA | KGEQR | |
| > RXA02664 (1-660, translated) 220 residues | | | | | |
| VGESGCGKST | LARVMVGLQP | VTSGEVLFKG | KPMKPRGAQR | KELGSSVSVV | FQDPATSLNP |
| RMTVREQLLD | PLRVHKVGDE | ASRNQWVSEL | ISMVGLPQSA | LEVLPRQVSG | GQRQRVAIAR |
| ALALKPDIIV | ADEPTSALDV | SVRAQVLNLL | LDLKTELGLG | LVFISHDINT | VRYVSDRIAV |
| MLAGEIIEEN | TTSEIFNNAQ | QDYTRTLLEA | TPSLLNKTRL | | |
| > RXA02684 (1-864, translated) 288 residues | | | | | |
| VLAVGLVLVF | VVTLWADSKL | NRVDATPATQ | VANTAGTNWL | LVGSDSRQGL | SDEDIERLGT |
| GGDIGVGRTD | TIMVLHMPRT | GEPTLLSIPR | DSYVNVPGWG | MDKANAAFTV | GGPELLTQTV |
| EEATGLRIDH | YAEIGMGGLA | NMVDAVGGVE | MCPAEPMYDP | LANLDIQAGC | QEFDGAAALG |
| YVRTRATALG | DLDRVVRQRE | FFSALLSTAT | SPGTLLNPFR | TFPMISNAVG | TFTVGEGDHV |
| WHLARLALAM | RGGIVTETVP | IASFADYDVG | NVAIWDEAGA | EALFSSMR | |
| > RXA02728 (1-813, translated) 271 residues | | | | | |
| MAIVSLDNVT | VSIEGKKLLD | AVSLKAYPGE | VLGLIGPNGA | GKSTLLSVLS | GDRLPDSGEV |
| NVGGLDPATA | AASDMARVRA | VMLQDVSVAF | SFLVWDVVEM | GRRPWQKAST | PEEDHEIIEA |
| ALAATSVSHL | AEREITTLSG | GERARVALSR | VLAQQTPIVL | LDEPTAAMDI | SHQEQTLGTA |
| RALAAAGAAV | IVVLHDLNAA | AAYCDSIVCL | SDGRVIASGS | VDQVYSTETL | SRVYGWPIRV |
| DHSGKYVRVE | PDRSEANLPS | VLQVKNTVSP | A | | |
| > RXA02750 (1-816, translated) 272 residues | | | | | |
| MAVLFSIMGA | LILLVLYVLF | LGKLQIDGLM | VDLPDSARDD | VEGFVFNWVF | SGILITSAIT |
| VPQAALGVLV | EDRTRGGIKD | FLVAPVSRTT | LTVSYIEAAV | IVAMTILIFE | IVVGSIGLAI |
| LGHFSMSIAR | VLELVVALLL | LTLVFSAIAA | FLITLVKSQG | GMSALSSLVG | TLAGFLSAAY |
| IPPIALPEAV | TNVLNFLPFT | PAGMLIRQIV | VAPALDAISL | PPEAFDIFQF | GYGLKLEMFG |
| EPVSTWVAVG | IVASWGVVFG | LIAAFKMKSV | VR | | |
| > RXA02761 (1-201, translated) 67 residues | | | | | |
| MMDGINRRTT | LITGYSLTTI | SHVLIGIASV | AFPVGDPLRP | YVILTLVVVF | VGSMQTFLNG |
| SYLGYAL | | | | | |
| > RXA02762 (1-285, translated) 95 residues | | | | | |
| MLSELFPLAM | RGFAIGISVF | FLWIANAFLG | LFFPTIMEAV | GLTGTFFMFA | GIGVVALIFI |
| YTQVPETRGR | TLEEIDEDVT | SGVIFNKDIR | KGKVH | | |
| > RXA02769 (1-711, translated) 237 residues | | | | | |
| TVVPVYLAEL | APLEIRGSLT | GRNELAIVTG | QLLAFVINAL | IAVTLHGVID | GIWRIMFAVC |
| ALPAVALFLG | MLRMPESPRW | LVNQGRYDDA | RRVMETVRTP | ERAKAEMDEI | IAVHSENNAA |
| LPGVKQSSGQ | ASGQVSSKHT | HMSIGEVLSN | KWLVRLLIAG | IGVAVAQQLT | GINAIMYYGT |
| RVLEESGMSA | EMAVVANIAF | GAVAVIGGLI | ALRNMDRLDR | RTTFIIGLSL | TTTFHLL |
| > RXA02795 (1-1095, translated) 365 residues | | | | | |
| IDVSLPERTA | SAYPHELSGG | QRQRALIAMA | LANDPDLLIC | DEPTTALDVV | VQKQIVDLLL |
| RLTKERGTAL | LFITHDLGLI | ARTCERLLVM | KSGETVERGD | TEAILRSPAH | SYTQQLLDAS |
| ILDQPEIASD | SGAPVVIDVE | EASKSEKETT | ALHKVSLAVR | KGDLLGIVGG | SGSGKTTLLK |
| LIAGLDKPTT | GTVAVTGGVQ | MVFQDPQSSL | NPRMKIKDIV | AEPLLGWNAA | EKTTRVAEVI |
| TQVGLSPDVL | DRYPHEFSGG | QRQRISIARA | LAIKPAILLA | DEPVSALDVS | VRKQVLDLLQ |
| QLVEEYGITL | VFVSHDLAVV | RHLCTTVWVM | EQGRVLEQGP | IDSVYDHPQT | EYTKELLDAV |
| PRLSL | | | | | |
| > RXA02808 (1-258, translated) 86 residues | | | | | |
| FYEGILPVLA | ESASHFGIEP | VEMARASITG | QPVHMQSPLV | PAILLLVSLA | NVNLGDHHKK |
| VLWRACIVSI | AMLAVALFIG | VVPLSA | | | |
| > RXA02863 (1-975, translated) 325 residues | | | | | |
| MKKSLIAIVA | SALVLSGCTS | DSSDSSGTSG | TVETTSITTS | VAAADGAFPR | TVTLDDSSIT |
| LESKPERIAV | LTPEAASLVL | PITGADRVVM | TAEMDTADEE | TAALASQVEY | QVKNGGSLDP |
| EQVVAGDPDL | VIVSARFDTE | QGTIDILEGL | NVPVVNFDSD | AWGDIDAITK | HLEIVGELVG |
| EEDKAAEAIA | EIDANRIDID | KPATSPTVLT | LMQRGPRQMV | MPESAMLNGL | IREAGGTPVV |
| DSLGAVGTIT | ADPEQVVAMA | PEIIIIQDFQ | GKGRENFANF | LSNPALANVP | AIENDKIFYA |
| DTVTTGVTAG | TDITTGLQQV | AEMLS | | | |
| > RXA02864 (1-780, translated) 260 residues | | | | | |
| MPQLVEIRDL | NVEFPSRHAV | KNVSFSAPAG | KVTALIGPNG | AGKSTALSAI | AGLVESTGEV |
| MVGGSGVASK | SAKARARLLS | LVPQNTELRI | GFSARDVVAM | GRYPHRGRFA | VETDADRRAT |
| DDALRAINAL | DIAEQPVNEL | SGGQQQLIHI | GRALAQDTAV | VLLDEPVSAL | DLRHQVEVLQ |
| LLRARANSGT | TVIVVLHDLN | HVARWCDHAV | LMADGEVVSQ | GDIREVLEPA | TLSTVYGLPI |
| AVRDDPETSS | LRVIPHPNPF | | | | |

>RXN00001 TRANSLATE of: rxn00001.seq check: 7420 from: 1 to: 1128
MATVTFKDASLSYPGAKEPTVKKFNLEIADGEFLVLVGPSGCGKSTTLRMLAGLENVTDG
AIFIGDKDVTHVAPRDRDIAMVFQNYALYPHMTVGENMGFALKIAGKSQDEINKRVDEAA
ATLGLTEFLERKPKALSGGQRQRVAMGRAIVRNPQVFLMDEPLSNLDAKLRVQTRTQIAA
LQRKLGVTTVYVTHDQTEALTMGDRIAVLKDGYLQQVGAPRELYDRPANVFVAGFIGSPA
MNLGTFSVKDGDATSGHARIKLSPETLAAMTPEDNGRITIGFRPEALEIIPEGESTDLSI
PIKLDFVEELGSDSFLYGKLVGEGDLGSSSEDVPESGQIVVRAAPNAAPAPGSVFHARIV
EGGQHNFSASTGKRLP
>RXN00099 TRANSLATE of: rxn00099.seq check: 3872 from: 1 to: 1173
VKNPRLIALAAIILTSFNLRTAITALAPLVSEIRDDLGVSASLIGVLGMIPTAMFADAAF
ALPSLKRKFTTSQLLMFAMLLTAAGQIIRVAGPASLLMVGTVFAMFAIGVTNVLLPIAVR
EYFPRHVGGMSTTYLVSFQIVQALAPTLAVPISQWATHVGLTGWRVSLGSWALLGLVAAI
SWIPLLSLQGARVVAAPSKVSLPVWKSSVGVGLGLMFGFTSFATYILMGFMPQMVGDPQL
GAVLLGWWSILGLPLNILGPWLVTRFTNCFPMVVIASVMFLIGNGGFCLAPDVAPWLWAT
LSGLGPLAFPMALTLINIRAETSAGASALSSFGQGLGYTIACFGPLLTGFIVDATGSFRT
IFVLFAVATLFVIRGGYFATRQVYVEKLLNR
>RXN00193 TRANSLATE of: rxn00193.seq check: 1918 from: 1 to: 594
KAFXQREGFISAFGFTVLVVIVSVITVNIFAFLLAWLLTRKLRGTNFFRTVFFMPNLIGG
IVLGYTWQTMINAVLSHYATTTSADWKFGYAGLIMLLNWQLIGYMMIIYIAGLQNVPPEL
IEAAELDGVNKWEMLRHVTIPMVMPSITICLFLTLSNSFKLFDQNLALTNGAPGGQTEMV
ALNIINTLFNRMNVEGVG
>RXN00378 TRANSLATE of: rxn00378.seq check: 9591 from: 1 to: 2610
VDKAVNTAISDAKTAALKAGVGLNRATASEEEEDLSSSIKVSLAFELEGLSNAPSLMVVE
KALEKIPGVSADLIYPSQTAWITATDRVHPETLIEVFEQFGIKAHLSNSSLLRRHQQLSA
EVNREARLDRYRSRMDAKRISPRVRRHNRQEMVHAVRARESGWIKRRNHTTSQHEDPMSG
DVLFTARALITPKRLWVSLPFALIVLALSLNPSWQFDYWQWLSAVLAIPVVVWGAWPFHR
AAAGGIRRGISALDATSSIAIAAAYAWSIAMLLFETPGGKSWRSYPSWFAFDHGTLTQNE
IYFDVACGITVLLLAGRLLTRRRSQSSLLAELGRLQIDPQRIVTVVRKHRLKRVVQELNI
PVQEVRVNDDVKVPPNTTIPVDGTVIGGGSRIAASIIMGQDQRDVKVNDKVFAGSLNLES
EIKVRVIRTGHRTRIAAVHRWVKEATLKENRHNRAAIRSAGNLVPITFTLAVVDFCLWAL
ISGNINAAFTTTLAVLACVAPVALALSAPLATRNSIEAAARHGILVRSGEIFRVLDDVDT
AVFNRVGTLTDGEMTVETVTADKGEDPELVLRVAGALAMESHHAISKALVKASREARDTG
AGGEDVPHWIEVGNVEITEAGSEQATIELPLIKPSGEKIMRTTEALLWRPRSMTEVREHL
SPRLVAAATSGGAPLIVRWKGKDRGVITLSDHVRSDSSDAIIAIEEQGIETMMLSRDTYP
VARRYADSLGITHVLAGIAPGKKAQVVRAVHTRGSTVAMIGDESVMDCLKVADVGVLMGV
DRPSDLRDDSDDPAADVVVMREEVMSVPTLFKLARRYAKLVNGNIALAWIYNGVAMVLAV
SGLLHPMAATVAMLASSLLIEWRSGRARKY
>RXN00412 TRANSLATE of: rxn00412.seq check: 7568 from: 1 to: 1080
VSHTASTPTPEEYSAQQPSTQGTRVEFRGITKVFSNNKSAKTTALDNVTLTVEPGEVIGI
IGYSGAGKSTLVRLINGLDSPTSGSLLLNGTDIVGMPESKLRKLRSNIGMIEQQFNLFQS
RTAAGNVEYPLEVAKMDKAARKARVQEMLEFVGLGDKGKNYPEQLSGGQKQRVGIARALA
TNPTLLLADEATSALDPETTHEVLELLRKVNRELGITIVVITHEMEVVRSIADKVAVMES
GKVVEYGSVYEVFSNPQTQVAQKFVATALRNTPDQVESEDLLSHEGRLETIDLTETSGFF
AATARAAEQGAFVNIVHGGVTTLQRQSFGKMTVRLTGNTAAIEEFYQTLTKTTTIKEITR
>RXN00431 TRANSLATE of: rxn00431.seq check: 340 from: 1 to: 789
MVSIDTYNACVDFPIEDAKSRSMKKAFLGAAGGAIGRNQDNVVVVEALKNVNLHLREGDR
VGLVGHNGAGKSTLLRLLSGIYEPTRGSADIRGRVAPVFDLGVGMDPEISGYENIIIRGL
FLGQTRKQMKAKMEEIADFTELGEYLSMPLRTYSTGMRIRLALGVVTSIEPEILLLDEGI
GAVDAAFMAKARDRLQALVERSGILVFASHSNDFLAQLCNTALWVDHGQIREAGLVPDVV
EAYEGKGAGDHVRRLLTRMEEEK
>RXN00444 TRANSLATE of: rxn00444.seq check: 7535 from: 1 to: 837
MVLAQTKKARRSENHILPGWLLIPATLAMLLIIGPIEALLLQIPWDRSWELLTAPESLGT
ARLSIGTALFSTALCAIVGFPLALALHLYERSHPRVTSVLTVLVYAPLVLSPVVSGLALT
FLWGRRGFLGSWLDQVGLPIAFTTTAVVEAQVFVALPFFISTVTTALRGIPKQFEEIAAT
EGATRWEIMHKMIIPLAMPGIFTGMILGFARALGEYGATLTFAGNIAGVTRTIPLHIELG
LSSNDMDKALGAVIMLLAVYVLIIGAIGALRLFSKVRKV
>RXN00466 TRANSLATE of: rxn00466.seq check: 8825 from: 1 to: 996
VQSRLSKILRSSVVGVAVLALLAGCSNNADDTDADSTSTGNSAFPVSIEHEFGTTTIDDV
PERVVTLGVTDADIVLALGTVPVGNTGYKFFENGLGPWTDELVEGKELTLLDSDSTPDLE
QVAALEPDLIIGVSAGFDDVVYEQLSDIAPVVARPAGTAAYAVAREEATNLVARAMGQSE
KGQELNEETDALIQAARDENPSFDGKTGTVILPYQGKYGAYLPGDARGQFLDSLGISLPE
AVLSRDTGDSFFVDVPAESVKDVDGDVLLVLSNDENLDITAENPLFETLNVVQKDAVIVA
TTEERGAITYNSVLSVPFALEHLAPRIAEALK
>RXN00523 TRANSLATE of: rxn00523.seq check: 9218 from: 1 to: 1026
MSLSHQLKRQRASRNSRRWLIVAALGVVTLGIFAFSLMWGEVFYGPAQVLKVLSGQQVPG
ASYSVGVLRLPRAVMGLTAGLAFGAAGVIFQTVLRNQLASPDIIGISSGASAAGVICIVF
FGMSQSAVSAISLCASLAVALLIYLVAYRGGFSATRLILTGIGIAAIMLNSLVSYSLSKAD
SWDLPTATRWLTGSLNGATWDRAMPLIVTTVVLIPLLVANARNVDLMRLGNDSAVGLGVA
TNRTRVIAIIAAVALIAVATAACGPIAFVAFVSGPIAARILGSGGSLIIPSALIGGLIVL
IADLIGQYFLGTRYPVGVVTGAFGAPFLIYLLIRSNRAGVTL
>RXN00525 TRANSLATE of: rxn00525.seq check: 5915 from: 1 to: 1263
MSLAESILLALTSLRSNKMRALLTLLGVIIGIASVIGILTIGKALQDQTLNSLESLGAND
LSAQVEERPDEDSPEPDMFAFSGAANSSGNLIPEETVDTLRDRFAGSITGISVGGMGTQG
TLIGDTADLKSDLLGVNEDYMWMNGVEMNYGRAITQDDVAAQRPVAVIAPDTFNTLFDAN
PNLALGSEVAFELNGQETFLRVIGVYKEAAAGGLVGSNPTVHTYTPYTVANDITHTEDGL
NTLSIRAAQGVDQDSLKGSLQTYEDALYANNDSHHVAMLDFRKQIEEFNTILGAMSLGIS
AIGGISLLVGGIGVMNIMLVSVTERTREIGVRKALGARRRDIRLQFVVEAMIICFIGGIL
GVLLGGILGLIMSSAIGYISLPPLSGIVIALVFSMAIGLFFGYYPANKAAKLDPIDALRY
E
>RXN00702 TRANSLATE of: rxn00702.seq check: 9529 from: 1 to: 1707
MSAPFSARTAWSTDPVLELESVAASYYDDERTLAAPQISDVNLTLFEGEILLVVGRTGSG
KSTLLNAMSGAMPHATGGRLDGRVRVVGRDTRDFPPRMLSDVVGVVGQDPAASFITNTVE
EELAYSMEQLGLPPAVMRKRVEETLDLLGIAELRYVPLAELSGGEQQRVAIGAVLTTRPA
LIILDEPTSALDPNGAEDVLATVTKLAHDLAMTVVLAEHRIERVLQYVDRVAHVGADGHV
TVGTPEEIMADSDVAPPIVELGRWAGWAPLPLSIRDARAHSADMRKRLYQRGLVVNKLHN
HAVQPLLIAEDIMVDFPEIRAVDGVNLNLNSGEITVLMGRNGCGKSSLLWALQGSGTRNQ
GSVQVLDEAAGFSWTDPKTLKPAKRRNLVSMVPQTPTDILYESTVHAELARSDKDAAAPA
GTTREILDSLVPNIPDHLHPRDLSEGQKLSLALSIQLAAKPRVVFFDEPTRGLDYDGKKS
LARSFQQLADDGHAILVVTHDVEFSALCADRVLFMASGKIISDGTAVEILPASPAYAPQV
AKITAGIQEESHWLTVSAVKAALGHGEIS
>RXN00726 TRANSLATE of: rxn00726.seq check: 2288 from: 1 to: 591
NAGRLYVDGDLIGYRERDGVLYEISEKDAAKQRSDIGMVFQNFNLFPHRTVIENIIEAPI
HVKKQPESKARARAMELLEQVGLAHKADAYPVQLSGGQQQRVAIARAVAMEPKLMLFDEP
TSALDPELVGEVLRVMKQLADDGMTMLVVTHEMGFAHEVADQVVFMADGVVVEAGTPEQV
LDNPKEQRTKDFLSSLL
>RXN00732 TRANSLATE of: rxn00732.seq check: 6509 from: 1 to: 1647
NHLLLLPTVKADIIDNGVVTGDIGYIWHTGGIMLALTLVQVACAIAGVYFGSKLSMRVGR
DLRSAIFGKVVNFSEREMGQFGAPSLITRNTNDVQQVQMLVQMTSTLMISAPMLAIGGII
MAVRQDLGLSWLMVVSIPVLIIVVALIIVRMVPLFQTMQKRIDRINQIIREQLTGIRVIR
AFVREDVERERFTTASKDVADIGVRTGNLMALMFPAVMLIMNLSAVAVIWFGAFQVESGE
TQIGTLFAFLQYIMQILMGVMMAAFMFVMVPRAAVSADRIGEVLETTPSVQAPETPAQPS
TSAGEIVFNNATFAYPGADDPVLNNVSFRVAPGSTTAIIGSTGSGKTTLIGLVPRLFDVT
EGDVTVDGTDVREFEPLKLWDRIGLVPQKSFLFSGTIASNLRYGNEDATETQLWQALAIA
QAADFVREMPEGLDSEIAQGGTNVSGGQRQRLAIARALLKQPEIYIFDDSFSALDVSTDA
ALRRALSTNLPDATKLIVAQRVSTIRDADQIVVLDNGEVVGIGTHTNLLNTCGTYREIVE
SQETAQAQS
>RXN00759 TRANSLATE of: rxn00759.seq check: 3116 from: 1 to: 924
MLRYVGRRLLQMIPVFFGATLLIYALVFLMPGDPVQALGGDRGLTEAAAEKIRQEYNLDK
PFTVQYLLYIKGIFVLDFGTTFSGQPVIDVMARAFPVTIKLAIMALLFESILGIIFGVIA
GIRRGGIFDSTVLVLSLIVIAVPTFVIGFVLQFLVGVKWGLLPVTVGSNTSITALIMPAV
VLGAVSFAYVLRLTRQSVSENLRADYVRTARAKGMSGFNVMNRHVLRNSLIPVATFLGAD
LGALMGGAIVTEGIFGINGVGGTLYQAILKGEPTTVVSIVTVLVIVYIIANLLVDLIYAV
LDPRIRYA
>RXN00808 TRANSLATE of: rxn00808.seq check: 7354 from: 1 to: 1458
VLGTNVFGALAVMLFVRFLIPQPDASNFNAEISYLPAVGFAYLAFAIVAGMLVTFLMFRP
VLDWQRSPEDHDRNMVRNLVMRIPIYQAILCAVVWLIGIAIATLISASVSTSLALVVAFS
TLMAAAIVVLLTYLEAERLVRPVAASALARRFEDSTLEPPVSQRLRMTWLLTLGIPVMGI
LLLIWGYSQGIFGSDASGIMPAIAALAFASLVTGYLGNRLVVSSVVDPIRELQEAINRVR
RGENDVQVDIYDGSEIGVLQAGFNEMMRGLRERQRVRDLFGRYVGAEVAKRALEERPTLG
GEDRKVAVLFVDVIGSTTFAVNHTPEEVVEALNEFFEHVVEVVHRNKGVINKFQGDAALA
IFGAPLPLSDATGHALAAARELRAELKDLQLKAGIGVAAGHVVAGHIGGHARFEYTVIGD
AVNQAARLTEIAKTTPGRTVTNASTLREANEAEQARWTLMKSVELRGRSQMTQIARPIRP
TLADRS
>RXN00828 TRANSLATE of: rxn00828.seq check: 8544 from: 1 to: 453
VRGGLNTPPHKWRSADLAARIGTVFQDPEHQFVARTVRDELEIGPKIMKVDASERIEELL
DRLRLRHLENANPFTLSGGEKRRLSVATALVAAPKLLILDEPTFGQDPETFTELVTMLRE
LTDNGISIVSVTHDPDFIAALGDHHIEVSAK
>RXN00832 TRANSLATE of: rxn00832.seq check: 2297 from: 1 to: 1050
MPFSWLKPIDYARIFVGWASIFIIPLITLPSIIELALIVAVILFCAFGVVKMAERLAHIL
GDPFGSLILTLSIVIIEVILICAVMLGPADSTTAGRDSVMAVSMIIMGLVVGLCLLIGGL
RHGSMPHNGVGTPTYLVLIATFSVIAFAVPAFRGEYSTGQALVISTLTAVVYGFFLFRQM
GAQAGEFQEVEVAEKADDAAKWEVPFRGLILIITVLPIVLLSHDMATVMDEVLASLGAPV
AMAGLIIATIVFLPETITSLKAAWTGEIQRVSNLAHGAQVSTVGLTIPAVLVIGVITGQD
VVLGETPINLLLLGTTIAVTAIAFSSKKVSAVHGSVLLMLFGVYMMSMFA
>RXN00934 TRANSLATE of: rxn00934.seq check: 9723 from: 1 to: 1083
VRIGMVCPYSFDEPGGVQAHILDLARTFIAQGHEVQVLGPCSADTQVPDFVVRGGGSIPI
PYNGSVARLSFGPKMFKAVRTFLREGNFDVLHIHEPNSPSFSMAALRFAEGPIVATYHAS
SSGSKLLKAFLPVLSPMLEKVRAGIAVSEMARRWQVEQVGGDPVLIPNGVETSMFKAARQ
IEPNDPVEIVFLGRLDESRKGLDILLRALTRLDRPFTCTVIGGGTPREVAGINEVGRVSD
EEKAAILGRADIYVAPNTGGESFGIVLVEAMAAGCAVVASDLEAFSLVTDSEAAQPAGVL
EKTGSDADLAKKLQALIDDPSSRSTLIAAGLKRANAYDWSTVSTQVMAVYETIAIDKVRL
G
>RXN00939 TRANSLATE of: rxn00939.seq check: 3908 from: 1 to: 1236
MTRQKTQPFLEKESKYYTPGVMIAALAVGLITLNVELALTLLVIACPGALVISIPVSIVA
GIGRSAKDGVLIKGGEYLETSAKVDTVVVDKTGTLTNGRPELTNVDVLDPAYSDDEVLTL
AARAETASEHPLAEAIIRGAENRGLTVAMVEKAEPVAGRGIRADVDGATVAVGSADLLDH
TPDNTRILELNEQGRTAMYVGINGKAVGIVAVADTIRDDAPAAIRSLHNKGIRVVMATGD
AERVARNVAAELGVDEVRAELMPEDKLEIVKELQAQGRVVAMVGDGVNDTPALATADIGV
AMGAAGSPAAIETADTALMADKLPRLPYALGLAQRTVRTMRVNIGIALLTVTILLAGVLL
GGVTMSIGMLVHEASVLLVIAIAMLLLRPTLKEDKDKADVSTADAAKETLSA
>RXN00960 TRANSLATE of: rxn00960.seq check: 4118 from: 1 to: 1035
MARHCCSNRYASTVFSGLIAYGASQALYPWLLKDHQSVTEIDLDAGALQPYPNIENPPPF
EVMTALLLAECLGLGMAVIKSDTLFKVTRELERVVMKTITAFVIPLLPLFIFGIFLGMGM
NGGLLEIMSAFGKVLILAVVGTLLFLAIQFIIAGAVSKKNPWKLFKNNLPAYFTALGTSS
SAATIPVTYQQTLKNDVDVNVAGFVVPLCATIHLAGSMMKIGLFTFAVVFMYDMEVGVGL
SIGFLLMLGITMIAAPGVPGGAIMAATGMLASMLGFNTEQVALMIAAYIAIDSFGTAANV
TGDGAIAVIVNKFAKGQLHTTSPDEIEEDDRVAFDITPSDVEHHK
>RXN00980 TRANSLATE of: rxn00980.seq check: 2367 from: 1 to: 1794
MLADAFMIAAAIVAGWPIAQSAYQALRIRMVSIDLLVVVAAVGAMFINNYWESAAVTFLF
ALGKALERATMNRTRKALSDLVDAAPETATRLNADDSTEVVELWELEPGDIVLVRNGEQI
PVDGNVIAGVGGIDESNITGESMPAEKGQGSDVYAGTWLRSGVLRVEATGIGSDSTLAKI
IHRVEDAQDDKARTQTFLEKFSKWYTPGVMIAAAVVGLITWDVELALTLLVIGCPGALVI
SIPVSIVAGIGRAARDGVLIKGGEYLETAAKVDVVVVDKTGTLTTGRPELTDVEVIEPAY
SQGEVLELAARAETASEHPLADAIIRGAQDRGLSTTLVEAAENITGRGIIANVDGQAVAV
GSAELLDHEPDSTRILELNAEGKTAMFVGVNGHAIGIVAVADAVRSDSASAIESLHKAGI
QVVMATGDAHRVAQNVASKLGVDEVYSELLPEQKLELVRDLQAAGKTVAMVGDGVNDTPA
LAAADIGVAMGVAGSPAAIETADIALMADRLPRLAHAVTLAKRTVRTMRINILIALATVM
VLLAGVLFGGVTMSVGMLVHEASVLLVISIAMLLLRPTLKEDAAQASDIKRSEIQQIA
>RXN01000 TRANSLATE of: rxn01000.seq check: 4854 from: 1 to: 846
MSTLTSHRTVPAPSSPPARPNKLARNIVAIVAALIVLIATGTLKIEWNELPQMPAQVWHY
LELMFSDPDWSKFGRAVQEMWRSIAMAWLGAILCVVVSVPLGMLAARGVGPYWLRTVLRF
VFAVIRAFPEVVIAIILLTVTGLTPFTGALALGISGIGQQAKWTYEAIESTPTGPSEAVR
AAGGTTPEVLRWALWPQVAPSIASFALYRFEINIRTSAVLGIVGAGGIGSMLANYTNYRQ
WDTVGMLLIVVVVATMIVDLISGTIRRRIMKGASDRVVAPSN
>RXN01002 TRANSLATE of: rxn01002.seq check: 1757 from: 1 to: 804
MNSDASATTNSWATNPDHVSVTYPNGTKALDDVSLTINPGEMVAIVGLSGSGKSTLIRTI
NGLVRATEGTVTVGPHQINTLKGKALRDARGQIGMIFQGFNLSERSSVFQNVLVGRFAHT
AWWRNLLGFPTEHDKQIAFHALESVGILHKVWTRAGALSGGQKQRVAIARALSQDPSVML
ADEPVASLDPPTAHSVMRDLENINNVEGLTVLVNLHLIDLARQYTTRLVGLRAGKLVYDG
PTSEATDKDFEATYGRPIQAKDLLGDRA
>RXN01141 TRANSLATE of: rxn01141.seq check: 9956 from: 1 to: 825
LSTALAGAARYVTSTSNNEPADNTPLTIGYVPIAGSAPIAIADALGLFKKHGVNVTLKKY
SGWSDLWTAYATEQLDVAHMLSPMTVAINAGVTNASRPTELSFTQNTNGQAITLASKHYG
SVNSAADLKGMVLGIPEEYSVHALLLRDYLVSNAVDPIADLELRLLRPADMVAQLTVEGI
DGFIGPGPFNERAISNGSGRIWLLTKQLWDKHPCCAVAMAKEWKAEHPTAAQGVLNALEE
ASATLSNPAQFDSSARTLSQEKYLNQPATLLDGPS
>RXN01142 TRANSLATE of: rxn01142.seq check: 3960 from: 1 to: 498
LTARGNIDFGLRSARPSLSKTERADITRTHLEQVGLTDAAERRPARLSGGMQQRVGIARA
FAIDPPIMLLDEPFGALDALTRRELQLQLLNIWEASRRTVVMVTHDVDEAILLSDRVLVM
SKSPEATIITDTPVNLPRPRHELSEDASVEAETTALRKRMLHLLEH
>RXN01164 TRANSLATE of: rxn01164.seq check: 868 from: 1 to: 1635
VTLFVRLALAAVGGLFVFASNEPIGWFVAGIVGTALFFISLAPWDLGVPQKRRKKNEPVP
FLQQMSTGPTVVQGMLLGFVHGLVTYLQLLPWIGEFVGSLPYVALSVVEALYSIALGAFG
VLIARWRDWKVLLFPAMYVAVEYLRSSWPFDGFAWVRLAWGQINGPLANLAALGGVAFVT
FSTVLAAVGVAMVIISKKRLAGAIITASVIAIGAVSSLYVDRNGTSDESIEVAAIQGNVP
RMGLDFNAQRRAVLANHARETLKLDEQVDLVIWPENSSDVNPFSDAQARAIIDGAVEHVQ
APILVGTITVDEVGPRNTMQVFDPVEGAAEYHNKKFLQPFGEYMPFREFLRIFSPYVDSA
GNFQPGDGTGVVEMNAANLGRAVTVGVMTCYEVIEDRAGRDAIANGAEFLTTPTNNATFG
FTDMTYQQLAMSRMRAIEFDRAVVVAATSGVSAIVNPDGSISQNTRIFEAATLTESIPLK
DTVTIAARVGEYVELLLVIIGVLAGLFAIRMNSRSKSAKGSARPAQVRVKKVPAKKAATN
RRKVK
>RXN01168 TRANSLATE of: rxn01168.seq check: 6703 from: 1 to: 810
MSSEAVDATTLVIIPTYNELENLPLIVDRVRTATPDVHVLIVDDNSPDGTGERADKLAAD
DDHIEVLHREGKGGLCAEYMAGFQWGLERDYQVLCEMDADGSHAPEQLHLLLAEITNGAD
LVIGSRYVPGGRVVNWPKNRWLLSKGGNVYISVALGAGLTDMTAGYRAFRREVLEALPLD
ELSNAGYIFQVEIAYRAVEAGFDVREVPITFTEREIGESKLDGSFVKDSLLEVTKWGLKH
RGGQAKELSKEMVGLLNYEWKHFKKRNTWL
>RXN01285 TRANSLATE of: rxn01285.seq check: 1049 from: 1 to: 726
LNVTIPDNTFTAIIGPNGCGKSTLLRGESRVLNPQHGKVLLDGRQLDSFKPKEIARELGL
LPQTSIAPEGIRVYDLIARGRAPYQSLIQQWRTSDEDAVAQALASTNLTELAARLVDELS
GGQRQRVWVAMLLAQQTPIMLLDEPTTFLDIAHQYELLELLRAFNEAGKTVVTVLHDLNQ
AARYADHLIVMKDGHVHATGTPEEVLTAEMVQGVFGLPCIISPDPVTGTPTVVPLSRSRA
GA
>RXN01298 TRANSLATE of: rxn01298.seq check: 8940 from: 1 to: 930
VSTLISEPEVDKLRKRAKRSRRTEWWLAAALLAPNLLLLAIFTYRPLLDNFRLSFFNWNI
SSPTSTFIGFDNYVEEFTRSDTLQVVLNTVIFTACAVIGSMVLGLLLAMLLDQKLFGRNF
VRSMVFAPEVISGAAIGVAFQFVFDPNFGLVQDLLGRIGVDSPQEYQNPNWALFMVTFTF
VWKNLGYSPVIYLAALQGLNKDLSEAAPVDGASAWTRFWKVTLPQLRPTTFFLSITVTLN
SVQVFDIIHTMTRGGPLGNGTTTLVYQVYTETFTNYRAGYGATIATILFLLLLIITVIQV
RYMDKENKQK
>RXN01323 TRANSLATE of: rxn01323.seq check: 658 from: 1 to: 2265
MAQTPAKIPAALNFIDVDLGVTGMTCTSCSARVERKLNKLDGVEATVNYATESAQVSYDP
SKVSPEQLIKTVEDTGYGAFTMASAAAESEEDNAPADSGQSRIDAARDHEAADLKHRVIV
SALLSVPVVLVSMIPALQFNNWQWAVLTLVTPIFFWGGSPFHKATWANLKRGSFTMNTLV
SLGTSAADLWSLWALFIENAGHPGMKMEMHLLPSASTMDEIYLETVAVVITELLLGRWFE
TKAKGQSSEALRKLLDMGAKDAVVLRDGAEVRVPVNQLKLGDVFITRPGEKIATDGEVDE
GSSAVDESMLTGESIPVEVTKGSKVTGATLNTSGRLMVKVTRIGADTTLSQMAKLVTDAQ
SKKAPVQRLVDQISQVFVPVVIVIAIATLIAHLVFTDAGLAPAFTAAVAVLIIAGPCALG
LATPTALLVGTGRGAQLGLLIKGPEILESTKKVDTIVLDKTGTVTTGTMSVTDVTAINYS
ETEILEFAAAVESASEHPIAQAIAKAAEHEQVTDFQNTAGQEVTGVVRGHEVRVGRPSST
LIDALLHPFQHAQKIGGTPVVVTIDGVDSGIITVRDTVKDTSAEAIRGLKELGLTPILLT
GDNEGAAKSVAAEVGIDQVIANVLPHEKVQNVEALQAQGKNVAMVGDGVNDAAALAQADL
GLAMGAGTDVAIEASDITLMNNDLRSAVDAIRLSRKTLGTTKGNLFWAFAYNVALIPVAA
IGLLNPMLAGIAMAFSSVFVVSNSLRLRGFKARSN
>RXN01338 TRANSLATE of: rxn01338.seq check: 9102 from: 1 to: 1902
KTYTPNPWMLFIRSFDGIITVAALVAIAIHLILWLALDLDGLAKNWPLIAIVIVGGIPLM
WDVLKSAIKTRGGADTLAAVSIITSVLLGEWLVAAIIVLMLSGGEALEEAASRRASGTLD
ALARRAPSTAHRLLGATILDGTEEIAVEEITVGDLVAVLPHELCPVDGEIVAGHGTMDES
YLTGEPYVVSKSKGSQAMSGAVNGDTPLTIVATKLAHDSRYAQIVGVLHEAENNRPEMRR
MADRLGAWYTVIALALGGLGWIVSGDPVRFLAVVVVATPCPLLIAVPVAIIGAISLAARR
GIIVKNPGMLENASGVKTVMFDKTGTLTYGRPVITDIHTAPGVEEDTVLALAASVERYSR
HPLADAIREGAKARELHLPDVVEVSERPGQGLTGTVGEHLVRITNRRSTLEIDPDSKNYI
PVTSSGMESVVLVDDKYAALIRLRDEPRASASEFIAHLPKKHKVDKLMIISGDRASEVRY
LADKVGIDEVHAEASPEDKLNIVNRHNEHGATMFLGDGINDAPAMAVATVGVAMGADSDV
TSEAADAVILDSSLERLDDLLHISARMRRIALQSAGGGMALSVIGMILAVFGFLTPLMGA
IFQEVIDVLAILNSARVALPRGAISDFDTQEKVS
>RXN01411 TRANSLATE of: rxn01411.seq check: 3735 from: 1 to: 765
MLGVGWRIPFLMAVPLGLIGWWIRTGAQENVRPASERPEAPIKQALRTEWKMMLRVGGFI
SCTGLSFYIFTTYMTTFLRSTVGLEGTLVLAGNIIALSMAAIVAPFVGRAIDKFPRRNIM
AFATLSTVIMAIPAYIIAGQGTLTASLIAQVMLGIGAVTANCVTSVMMAEVFQEVTRGTS
AGITYNVTYAIFGGSAPFISTALVSWTGSPLAPAVYMIIIALFAFTASRFIPETSPVFVT
ATPATKAPKVLVNPG
>RXN01808 TRANSLATE of: rxn01808.seq check: 4151 from: 1 to: 1149
QSLACKELAWMRGGAPARTSKPGFRLEAAEALIAEVPAPRDKVELMAFSKSRQGRVVIEL
EDATVATPDDRILVEDLTWRLAPGERIGLVGVNGSGKTTLLRTLAGEQPLQAGKRIEGQT
VKLGWLRQELDDLDLSRRLIDCVEDVASYVMMGDKQVSASQLAERLGESPKRQRTPVGDL
SGGERRRLQLTRVLMAEPNVLLLDEPTNDLDIDTLQELESLLDGWPGTMVVISHDRYLIE
RVTDSTWALFGDGKLTNLPGGIEEYLQRRAAMAAAEDSGVLNLGAATQAGTFSAATEQAA
TSVESSGISSQERHRITKEMNALERKMGKLDQQMDKLNQQLADAAEAMDTIKLTELDTKL
RAVQEEHGELEMQWLELGEEIEG
>RXN01939 TRANSLATE of: rxn01939.seq check: 574 from: 1 to: 1731
MTTNIPQTPNHEGEQPLLELKDLKISFTSSTGVVDAVRGANLTIYPGQSVAIVGESGSGK
STTAMSIIGLLPGTGKVTEGSIMFDGQDITGLSNKQMEKYRGSEIGLVPQDPMTNLNPVW
RIGTQVKESLRANHVVPGSEMDKRVAEVLAEAGLPDAERRAKQYPHEFSGGMRQRALIAI
GLAARPKLLIADEPTSALDVTVQRQILDHLETLTKDLGTAVLFITHDLGLAAERAEHLVV
MHRGRIVESGPSLKILRNPQHPYTQRLVKAAPSLASARIQSAQEQGIESAELLSATAVAE
GTIPEMEEKVIEVKNLTREFDIRGARGDKKKLKAVDDVSFFVRKGTTTALVGESGSGKST
VANMVLNLLEPTSGEVLYNGTDLTSLSHKEIFQMRRKLQVVFQNPYGSLDPMYSIYRCIE
EPLTIHKVGGDRKAREARVAELLDMVSMPRSTMRRYPNELSGGQRQRIAIARALALNPEV
IVLDEAVSALDVLVQNQILTLLAELQQELKLTYLFITHDLAVVRQTADDVVVMQKGRIVE
KGRTDDIFNDPQQHYTRDLINAVPGLGIELGTGENLV
>RXN01995 TRANSLATE of: rxn01995.seq check: 3763 from: 1 to: 1338
MDIRQTINDTAMSRYQWFIVFIAVLLNALDGFDVLAMSFTANAVTEEFGLSGSQLGVLLS
SALFGMTAGSLLFGPIGDRFGRKNALMIALLFNVVGLVLSATAQSAGQLGVWRLITGIGI
GGILACITVVISEFSNNKNRGMAMSIYAAGYGIGASLGGFGAAQLIPTFGWRSVFAAGAI
ATGIATIATFFFLPESVDWLSTRRPAGARDKINYIARRLGKVGTFELPGEQSLSTKKAGL
QSYAVLVNKENRGTSIKLWVAFGIVMFGFYFANTWTPKLLVETGMSEQQGIIGGLMLSMG
GAFGSLLYGFLTTKFSSRNTLMTFMVLSGLTLILFISSTSVPSIAFASGVVVGMLINGCV
AGLYTLSPQLYSAEVRTTGVGAAIGMGRVGAISAPLLVGGLLDSGWSPTQLYVGVAVIVI
AGATALIGMRTQAVAVEKQPEALATK
>RXN02062 TRANSLATE of: rxn02062.seq check: 5414 from: 1 to: 1170
MRVGMMTREYPPEVYGGAGVHVTELTRFMREIAEVDVHCMGAPRDMEGVFVHGVDPALES
ANPAIKTLSTGLRMAEAANNVDVVHSHTWYAGLGGHLAARLHGIPHVATAHSLEPDRPWK
REQLGGGYDVSSWSEKNAMEYADAVIAVSARMKDSILAAYPRIEPDNVRVVLNGIDTELW
QPRPTFDDAEDSVLRSLGVDPQRPIVAFVGRITRQKGVEHLIKAAALFDESVQLVLCAGA
PDTPEIAARTTALVEELQAKREGIFWVQDMLGKDKIQEILTAADTFVCPSIYEPLGIVNL
EAMACNTAVVASDVGGIPEVVVDGTTGALVHYDENDVETFERDIAEAVNKMVADRETAAK
FGLAGRERAINDFSWATIAQQTIDVYKSLM
>RXN02096 TRANSLATE of: rxn02096.seq check: 3261 from: 1 to: 1692
MGLDVSDEQIEHAARLAQAHDFIDRLPNKYEEVIGERGLTLSGGQRQRIALARAFLAHPK
VLVLDDATSAIDASTEDRIFQALREELHDVTILIIAHRHSTLELGDRVGLVEDGRVTALG
PLSEMRDHARFSHLMALDFQDSHDPEFTLDNGSLPSQEQLWPEVSTEKQYKILAPAPGRG
RGMSMPATPELLAQIEALPAATEETRVDAGRLRTSTSGFKLLSLFKQVRWLVVAVIALLL
VGVAADLAFPTLMRAAIDNGVQAQSTSTLWWIAIAGSVVVLLSWAAAAINTIITARTGER
LLYGLRLRSFVHLLRLSMSYFERTMSGRIMTRMTTDIDNLSSELQSGLAQTVVSVGTLIG
VVTMLAITDAQLALVALSVVPIIIVLTLIFRRISSRLYTASREQASQVNAVFHESIAGLR
TAQMHRMEDQVFDNYAGEAEEFRRLRVKSQTAIAIYFPGLGALSEIAQALVLGFGALQVT
RGDISTGVLVAFVLYMGLMFGPIQQLSQIFDSYQQAAVGFRRITELLATQPSVQIWAPTG
TLGRLPRSLYCLTTSPSAIQTIRS
>RXN02348 TRANSLATE of: rxn02348.seq check: 8038 from: 1 to: 1884
MLNRMKSARPKSVAPKSGQALLTLGALGVVFGDIGTSPLYSLHTAFSMQHNKVEVTQENV
YGIISMVLWTITLIVTVKYVMLVTRADNQGQGGILALVALLKNRGHWGKFVAVAGMLGAA
LFYGDVVITPAISVLSATEGLTVISPSFERFILPVSLAVLIAIFAIQPLGTEKVGKAFGP
IMLLWFVTLAGLGIPQIIGHPEILQSLSPHWALRLIVAEPFQAFVLLGAVVLTVTGAEAL
YADMGHFGARPIRVAWFCVVMPALILTYLGQGALVINQPEAVRNPMFYLAPEGLRIPLVI
LATIATVIASQAVISGAYSLTKQAVNLKLLPRMVIRHTSRKEEGQIYMPLVNGLLFVSVM
VVVLVFRSSESLASAYGLAVTGTLVLVSVLYLIYVHTTWWKTALFIVLIGIPEVLLFASN
TTKIHDGGWLPLLIAAVLIVVMRTWEWGSDRVNQERAELELPMDKFLEKLDQPHNIGLRK
VAEVAVFPHGTSDTVPLSLVRCVKDLKLLYREIVIVRIVQEHVPHVPPEERAEMEVLHHA
PIRVVRVDLHLGYFDEQNLPEHLHAIDPTWDNATYFLSALTLRSRLPGKIAGWRDRLYLS
MERNQASRTESFKLQPSKTITVGTELHL
>RXN02354 TRANSLATE of: rxn02354.seq check: 8723 from: 1 to: 834
MTKRTKGLILNYAGVVFILFWGLAPFYWMVITALRDSKHTFDTTPWPTHVTLDNFRDALA
TDKGNNFLAAIGNSLVISVTTTAIAVLVGVFTAYALARLEFPGKGIVTGIILAASMFPGI
ALVTPLFQLFGDLNWIGTYQALIIPNISFALPLTIYTLVSFFRQLPWELEESARVDGATR
GQAFRMILLPLAAPALFTTAILAFIATWNEFMLARQLSNTSTEPVTVAIARFTGPSSFEY
PYASVMAAGALVTIPLIIMVLIFQRRTVSGLTAGGVKA
>RXN02356 TRANSLATE of: rxn02356.seq check: 7192 from: 1 to: 996
MATVTFDKVTTRYPGAERATVHELDLDIADGEFLVLVGPSGCGKSTTLRALAGLEGVESG
VIKIDGKDVTGQEPADRDIAMVFQNYALYPHMTVAKNMGFALKLAKLPQAQIDAKVNEAA
EILGLTEFLDRKPKDLSGGQRQRVAMGRALVRDPKVFLMDEPLSNLDAKLRVQTRAEVAA
LQRRLGTTTVYVTHDQVEAMTMGDRVAVLKDGLLQQVAPPRELYDAPVNEFVAGFIGSPS
MNLFPANGHKMGVRPEKMLVNETPEGFTSIDAVVDIVEELGSESYVYATWEGHRLVARWV
EGPVPAPGTPVTFSYDAAQAHHFDLESGERIA
>RXN02391 TRANSLATE of: rxn02391.seq check: 7541 from: 1 to: 399
MTQSDLPDDVQELVTKIFGLARDGGAESAATLGAYVDNGVDVNLSNQDGNTLLMLAAYAG
HADVVQALIERGADVDRVNNRNQTPLAGAIFKKEEAVIEALLAGGADPYAGTPTAVDTAK
MEGREDLVARFES
>RXN02442 TRANSLATE of: rxn02442.seq check: 5164 from: 1 to: 849
MKFFTDALIVPFDVSFISRALVAGCLAAILCSLIGTWVILRRLTFFGDAMSHGLLPGVAT
ASLLGGNLMFGAAISALIMSAGVVWTSRKSSLSQDVSTGLQFITMLSLGVVIVSHSDSHA
VDLTSFLFGDILGVRPSDIFIIAIATVLGGLTIFLFHRQFTALAFDERKAHTLGLNPRFA
HLLMLALIALATVVSFQVVGTLLVFGLLIGPPATAALLVQDKASISLIMIVASLLGCAEI
YLGLLISWHASTAAGATITLLSAAIFFATLLTKSAISRLNFTA
>RXN02447 TRANSLATE of: rxn02447.seq check: 8454 from: 1 to: 1095
TVVPVYLAELAPLEIRGSLTGRNELAIVTGQLLAFVINALIAVTLHGVIDGIWRIMFAVG
ALPAVALFLGMLRMPESPRWLVNQGRYDDARRVMETVRTPERAKAEMDEIIAVHSENNAA
LPGVKQSSGQASGQVSSKHTHMSIGEVLSNKWLVRLLIAGIGVAVAQQLTGINAIMYYGT
RVLEESGMSAEMAVVANIAFGAVAVTGGLIALRNMDRLDRRTTFIIGLSLTTTFHLLIAA
AGTLLPEGNSIRPFAIMILVVGFVLSMQTFLNVAVWVWLAEIFPVRMKGIGTGISVFCGW
GINGVLALFFPALVSGVGITFSFLIFAVVGVIALAFVTKFVPETRGRSLEELDHAAETGQ
IFRKA
>RXN02455 TRANSLATE of: rxn02455.seq check: 2559 from: 1 to: 1269
LKRLTRIASISMASMLAAASLVACSGSTDEEGDVYFLNFKPEQDVAYQEIAKAYTEETGV
KVKVVTAASGSYEQTLKAEIGKDEAPTLFQVNGPAGFITWQDYMADMSDTEVAKQLTDDI
PPLTTEDGEVRGVPFAVEGFGTTYNDEIFDKYIATSGAKIKSTDEITSYQKLKEVAEDMQ
AKKDELGIEGAFASTSLTSSEDWRWQTHLANAPIWQEYQDKGVEDTNEIEFSYNKEYKNL
FDLYLENSTVEKSLAPSKTVSDSMAEFAQGKAANVQNGNWAWSQISETSGNVVKEDKIKF
LPMYMGLPDEEKHGINVGTENYLGVNSEASEVDQQATKDFVDWLFTSEAGKEHVVKDLGF
IAPFESYTAENTPNDPLSEQVAEAIANKDLTTYPWNFQYFPSQQFKDDFGQDLSQYASGK
LKW
>RXN02515 TRANSLATE of: rxn02515.seq check: 4857 from: 1 to: 756
MSTLEIRNLHAQVLPSDESAEPKEILKGVNLTINSGEIHAIMGPNGSGKSTLAYTLGGHP
RYEVTAGEVLLDGENILEMEVDERARAGLFLAMQYPTEIPGVSVANFLRSAATAIRGEAP
KLREWVKEVRTAQEALAIDPEFSNRSVNEGFSGGEKKRHEVLQLDLLKPKFAIMDETDSG
LDVDALRIVSEGINSYKQETEGGILMITHYKRILNYVKPDFIHVFANGQIVTTGGAELAD
KLEADGYDQFIK
>RXN02549 TRANSLATE of: rxn02549.seq check: 8075 from: 1 to: 2703
MVHAKQTKKPLPRFLHSAHFYVWIVLGFVVFAQPYGQVAADTKLDLLLNPAGFLTGALHA
WTDTFTLGQLQNQAYGYLFPQGFFFLITDFLPDWIAQRLWWWLVLGLGFSGFYALVARLG
IGNPAFRVIAALLFALSPRTLTTLTAISSETWPIMLAPWVCLPLLSRNVDARAIALSLLP
AACMGAVNATATMAALIPAALILLYRGLFLRLLLWGMGVLAVNSWWIGPLLVLGKYAPPF
TEFIESSSVTTSWLNPVEILRGTTSWTPFVDTERQAGYLLVNDALFVTLSVLVAALGLIG
LTLMKHRGLWAFMLAIGLLILGSAHLTAVQEFLDGPGAALRNIHKFDLLVRNPLMVGVAA
LGSHISLPLLGTTALTSGQGKHHTIPLPLQKRQAAGLLVVIIAVGALAPAWSARLLPQGT
WDEVPDYWYEATEFLNQNATGTRTLIWPSSPFARQDWGWTRDEPAQPLLDVPWAVRDAIP
LVPPEAIRGLDGLDDLGTLGTGLNDEALKRLGIGAVLVRHDLEADPDIEVDLPGEKHTFG
SQGQVDVYLTDPDRNMWITSGTSKQLPTVAGGGEILSLLDTINGYSPRTLVSENAQIVTD
TPQLVGTNYGDGTSSAALASLDETEVKNRIVDYPSAGPMTQVVQEGSITASSSGSDATSF
GGADPDRSLNSLLDHRYNTAWYPTPGDTSPWLEVSGTGTTLSISPRSTVTATITSGDSVM
VREFEKGRTTTVTLAEPEARIEFDGFVGISELSLEGLSRTITVPETSPDVQQFVPQRLTV
PTSFLDRTFTVPRHMSVTVEAQSCVTLELDGDRIDCGPSNSPPEPTRCAPNRNGSPSPNP
LRSPLFSQQQTSRQHPPTACSSPRALSIQVPARLSTPPPFPQSNSTPPPKVSSSPRTPPA
S
>RXN02570 TRANSLATE of: rxn02570.seq check: 2673 from: 1 to: 642
MNPLTWITGAFSMWTVVLGVNKLGLSIAVIIIAQVVAMTRVRNVSVLASTALLSVPALAS
MALIHMPYSSDGWLIALTLTARFSALMSIFLLAATAITIPELVKSLYRWPKLAYIVGSAL
QMIPQGKQTLALVRDANALRGRSVKGPVRAVKYVGLPLITHLLSAGAARAIPLEVAGLDR
PGPRTVLVEVVEGRVEKHCRWLLPLLAVGMAWWL
>RXN02595 TRANSLATE of: rxn02595.seq check: 5016 from: 1 to: 1164
VIVVAMASIMACLKAARLNNPMKILLLCWRDTTHPQGGGSERYLERVGEFLADQGHEVVF
RTAGHTDAPRRSFRDGVRYSRSGGKFSVYPKAWVAMMLGRVGIGTFSKVDVVVDTQNGIP
FFGKFFSGKPTVLLTHHCHKEQWPVVGRVLAKVGWLIESQIAPRAYKTAPYVTVSEPSAE
ELIALGVDQQRIHIVRNGVDPVPLHTPKLDRDGQHAVTLSRLVPHKQIEHAMDVVAALDG
VVLDVVESGWWQKELVDYARTLGVSDRVVFHGQVAEDHKHALLERATIHLMPSRKEGWGL
AVTEAAQHGVPTIGYRSSGGLRDSVVDGETGLLVDSKAELISATKTLLIDASLRSKLGAS
AKQRAENYKWDTAGAQFEELLLGLASKK
>RXN02614 TRANSLATE of: rxn02614.seq check: 5216 from: 1 to: 729
MTATLSLKPAATVRGLRKSYGTKEVLQGIDLTINCGEVTALIGRSGSGKSTILRVLAGLS
KEHSGSVEISGNPAVAFQEPRLLPWKTVLDNVTFGLNRTDISWSEAQERASALLAEVKLP
DSDAAWPLTLSGGQAQRVSLARALISEPELLLLDEPFGALDALTRLTAQDLLLKTVNTRN
LGVLLVTHDVSEAIALADHVLLLDDGAITHSLTVDIPGDRRTHPSFASYTAQLLEWLEIT
TPA
>RXN02795 TRANSLATE of: rxn02795.seq check: 7318 from: 1 to: 1437
VLKVSDLTVGNNFVHNVSFEVNPGERVGIIGESGSGKSLTALSIMGLTDLPTTGQITFNG
KPSATFRGTRIANVFQEPMSALNPLMRIGRQIEEMMTLHGASKKDARARLKSLLIDVSLP
ERTASAYPHELSGGQRQRALIAMALANDPDLLICDEPTTALDVVVQKQIVDLLLRLTKER
GTALLFITHDLGLIARTCERLLVMKSGETVERGDTEAILRSPAHSYTQQLLDASILDQPE
IASDSGAPVVIDVEEASKSFKETTALHKVSLAVRKGDLLGIVGGSGSGKTTLLKLIAGLD
KPTTGTVAVTGGVQMVFQDPQSSLNPRMKIKDIVAEPLLGWNAAEKTTRVAEVITQVGLS
PDVLDRYPHEFSGGQRQRISIARALATKPAILLADEPVSALDVSVRKQVLDLLQQLVEEY
GITLVFVSHDLAVVRHLCTTVWVMEQGRVLEQGPIDSVYDHPQTEYTKELLDAVPRLSL
>RXN02925 TRANSLATE of: rxn02925.seq check: 5237 from: 1 to: 2217
MSTPHHHGDHPAPETDHTHHPNHAGHEHHADAATHGQAMPHDRPHSTVDEEHQVHSHGEH
AGHSAANFRDRFWWSLILSVPVVFFSPMPADLLGYNIPEIPGAYWIPPVLGTIIFLYGGT
PFLKGAMTELKSRQPGMMLLIAMAITVAFIASWVTTLGLGGFHLDFWWELALLVTIMLLG
HWLEMRALGAASSALDALAALLPDEAEKVVDGTTRTVAISELAVDDVVLVRAGARVPADG
TIIDGAAEFDEAMITGESRPVYRDTGETVVAGTVATDNTVRIRVEATGGDTALAGIQRMV
ADAQASSSRAQALADRAAALLFWFALITALITAVVWTIIGSPDDAVVRAVTVLIIACPHA
LGLAIPLVIAISSERAAKSGVLIKDRMALEHMRTIDVVLPDKTGTLTEGAHAVTGVAPAT
GIAEGELLALAAAAEADSEHPVARAIVTAAAAHPEASQRQLRATGFTAASGRGIRATVDG
AEILVGGPNMLREENLTTPGELADITGSWAQRGAGVLHVVRDGEIIGAVAVEDKIRPESR
AAVRALQARGVKVAMITGDATQVAQAVGKDLGIDEVFAEVLPQDKDTKVTQLQERGLSVA
MVGDGVNDAPALARAEVGIAIGAGTDVAMESAGVVLASDDPRAVLSMIELSHASYRKMVQ
NLVWATGYNIVAVPLAAGVLAPIGVLLPPAAAAILMSLSTIIVALNAQLLRRIDLDPAHL
APTDGKEEKAAVSSAAPVR
>RXN02933 TRANSLATE of: rxn02933.seq check: 4913 from: 1 to: 810
MPLSGKIGGFIVAVVFVLAALSFIWTPFDPVQAFPQERLEGSSLRHLLGTDRYGRDVLSQ
IMVGSRVTLLVGIIAVAIAALIGTPLGIAAGMRRGMVETFVMRGADLMLAFPALLLAIIS
GAVFGASTWSAMVAIGIAGIPSFARVARAGTLQVTSQDFIAAARLSKVSSARIALRHILP
NITSMLIVQASVAFALAILAEAALSFLGLGTTPPDPSWGRMLQTAQASIGVTPMLAVWPG
AAIALTVLGFNLFGDGLRDAIDPKREVGRA
>RXN02945 TRANSLATE of: rxn02945.seq check: 2147 from: 1 to: 933
MTTALGTRVVARNFGYRHASRENPALKDINFEIAPGERILLTGASGAGKSTLLAALAGVL
GGSDEGVSTGELLVDAPSIGLVLQDPDSQVIASRIGDDVAFGCENLQIPREEIWPRVERA
LELVGLDLPLSHPTKYLSGGQKQRLALAGVIAMGARLILLDEPTANLDPQGQKNVVAAVD
RVVQETGATLIVVEHRHELWVNIIDRIISITDGEDVQPAELIKVGQLPGAQPSTSKPILW
ANDLLCTWGGLRSFEVPEGASTVITGPNGAGKSTLALTMGGLLPRKVGSWNSLTRCAAAL
TRPRTSGVQLI
>RXN02975 TRANSLATE of: rxn02975.seq check: 5313 from: 1 to: 249
VIVTNDLEVRVGARTLLDAPGQLLRVQPGDRIGLVGRNGAGKTTTMRILSGETKPYGGSV
TTSGEIGYLPQDSREGNIEQTAR
>RXN02994 TRANSLATE of: rxn02994.seq check: 4127 from: 1 to: 723
IKMTGVQKYFGDFHALTDIDLEIPRGQVVVVLGPSGSGKSTLCRTINRLETIEEGTIEID
GKVLPEEGKGLANLRADVGMVFQSFNLFPHLTIKDNVTLAPIKVRKMKKSEAEKLAMSLL
ERVGIANQADKYPAQLSGGQQQRVAIARALAMNPKIMLFDEPTSALDPEMVNEVLDVMAS
LAKEGMTMVCVTHEMGFARKAADRVLFMADGLIVEDTEPDSFFTNPKSDRAKDFLGKILA
H
>RXN03020 TRANSLATE of: rxn03020.seq check: 1931 from: 1 to: 603
MTLHVSNLNLTVADGSTSRTLLNNIHFWMSNQAKSSVSPAHPAPENPPYSPSSAASKAPD
SGTATLGDIDLLNPQNRAALRRNHLGIVFQQPNLLPSLTVLDQLLLIPRLGRILPPSRSA
RTQHKDKALSLLNSIGLGDLAKRKVSELSGGQQARVNLARALMNSPKLLLVDEPTAALDQ
HSASEVTELIVSMAHQYNAPT
>RXN03080 TRANSLATE of: rxn03080.seq check: 3725 from: 1 to: 780
MPQLVEIRDLNVEFPSRHAVKNVSFSAPAGKVTALIGPNGAGKSTALSAIAGLVESTGEV
MVGGSGVASKSAKARARLLSLVPQNTELRIGFSARDVVAMGRYPHRGRFAVETDADRRAT
DDALRAINALDIAEQPVNELSGGQQQLIHIGRALAQDTAVVLLDEPVSALDLRHQVEVLQ
LLRARANSGTTVIVVLHDLNHVARWCDHAVLMADGEVVSQGDIREVLEPATLSTVYGLPI
AVRDDPETSSLRVIPHPNPF
>RXN03081 TRANSLATE of: rxn03081.seq check: 3848 from: 1 to: 459
MKKSLIAIVASALVLSGCTSDSSDSSGTSGTVETTSITTSVAAADGAFPRTVTLDDSSIT
LESKPERIAVLTPEAASLVLPITGADRVVMTAEMDTADEETAALASQVEYQVKNGGRLDP
EQVVAGDPDLVIVSARFDTEQGTIDILEGLNVP
>RXN03108 TRANSLATE of: rxn03108.seq check: 138 from: 1 to: 267
MTKPNASVELNTITKSYGSTTIIGDTSITINDGEFVSLLDPSGCGKSTILKMIAGLASPS
TGTVSAGNEEIKGPGPDRGMVFQDHALLP
>RXN03116 TRANSLATE of: rxn03116.seq check: 7423 from: 1 to: 609
MGEGDVEKHFAFGLKAAKQRRFFARTVALMPQNPTIPAGLSVFDYVLLGRHPHSYAPGRA
DDEIVKRCLADLKLEHFSDRGLDELSGGERQRVSLARALAQEPRIVLLDEPTSALDIGHA
QETLELIDAIRHRLGLTVIAAMHDLTLTAQYGDRVLMMNGGRKVFEGTAAEVLTAQRISE
IYDATVIVEVIDGRPVVIPQRSH
>RXN03129 TRANSLATE of: rxn03129.seq check: 210 from: 1 to: 1224
MASIVFENVTRKYSPGARPAVDKLNLEIADGEFLVLVGPSGCGKSTSLRMLAGLEPIDEG
RLLIDGKDATELRPQDRDIAMVFQSYALYPNMTVRDNMGFALKNQKVAKAEIEKRVAEAS
RILQLDPYLDRKPAALSGGQRQRVAMGRAIVREPSVFCMDEPLSNLDAKLRVSTRAEISG
LQRRMGVTTVYVTHDQVEAMTMGDRVAVLLLGVLQQVDTPQNLYDYPANAFVASFIGSPS
MNLIEGTIRGDKVTLGTGIQISVPDEVAAEVRNNPDRFEGRPVIVGARPEHMYLTTANES
GAVLGEVSHIDELGADSMVYVLASGVKNPNTDLLGEGIPEDMRVTVVGAEETDKARLGIR
VERHHGLKAGDKVHVVAAPKDVHLFDGLDGRRIGASVLAPAHTVQSGH
>RXN03164 TRANSLATE of: rxn03164.seq check: 9986 from: 1 to: 870
MIYRRVGNSGLKLPAISLGLWHNFGDDKPLSTQRSIIHRAFDRGVTHFDLANNYGPPAGS
AETNFGRILREDLKSHRDELIISSKAGWDMWPGPYGFGGSRKYLVSSLDQSLTRLGLDYV
DIFYHHRPDPDTPLEETMYALRDIVASGKALYVGISSYGPELTAEAAEFMAEEGCPLLIH
QPSYSIINRWVEEPGDDGENLLQSAANNGLGVIAFSPLAQGLLTDKYLDGIPEGSRASQG
KSLSEGMLNVNNIDMVRKLNDIAQERGQSLAQNALAWVLREQREYGAGLP
>RXS00088 TRANSLATE OF: RXS00088.seq check: 1389 from: 1 to: 876
IEDNHGTEGISLPIEGVAATDNRAFELLDRWGVELVAAPLQLVPFTVTGYTEEGGVANLGSHREPDLEA
LAAAQPSLIINGQRFAQYYDDIIALNPDATVVELDPRDGEPLDQELIRQAETLGEIFGEEEDAAKIVAD
FESALERAKTAYAAISDQTVMAVNVSGGNIGYIAPSVGRTYGPIFDLVGLTPALEVGNASSDHEGDDIN
VEAIAAANPDLILVMDRDGGTSTRNEADYVPAEQIVSDNEALANVKAVTDGYVYYAPADTYTNENIITY
TEILNGMADMFEKAAQ
>RXS00372 TRANSLATE OF: RXS00372.seq check: 2326 from: 1 to: 1077
MSSKHPLKRTAVTVFALGASAALLVACSEPSEDVSTAETTTASSSANASDAAGEKVTITVYTSEPEEKV
DEINKAFMEANPDIEVEVYRAGTGDLTARIEAEKASGSIEADVLWAADAATFETYAAQGDLAELEDVET
SDIIEEALDAENFYVGTRIIPTVIAYNTEVVDQAELPTSWADLTDPKYAGQLVMPDPAVSGAAAFNASV
WKNDPALGEAWITALGENQPMIAQSNGPTSQEIAGGGHPVGIVVDYLVRDLAAAGSPIDTIYASEGSPY
ITEPAGVFADSEKKEAAERYINFLLSVEGQEIAVEQAYLPVREDVGTPEGTPELADIELMTPDLEVVTA
DKAAAVEFFQNAMN
>RXS00453 TRANSLATE OF: RXS00453.seq check: 3260 from: 1 to: 2349
VISAWLLILAIVGGLALTMQKGFSNSFTIEDTPSIDATVSLVENFPDQTNPVTAAGVNVVFQSPEGTTL
DDPQMMTAMDAVVDYIEDNLPDFGGGERFGNPVEVSPALEEMVIEQMTSMGLPEETAAKDAANLAVLSE
DKTIGYTSFNIDVEAAEYVEQKHRDVINEAMQIGEDLGVRVEAGGPAFGDPIQIETTSEIIGIGIAFIV
LIFTFGSLIAAGLPLITAVIGVGIGALAIVLATAFTDLNNVTPVLAVMIGLAVGIDYALFILSRYRAEY
KRMPRADAAGMAVGTAGSAVVFAGATVIIALVALIIADIGFLTAMGISAAFTVFVAVLIALTFIPALLG
VFGGHAFKGKIPGIGGNPTPKQTWEQALNRRSKGRSWVKLVQKAPGLVVAVVVLGLGALTIPAMNLQLS
LPSDSTSNIDTTQRQSADLMAEGFGAGVNAPFLVIVDTHEVNADSTALQPLIEAQEPEEGEFDREQAAR
FATYMYVTQTYNSNIDVKNAQIISVNDDFTAAQILVTPYTGPADKETPELMHVLRAQEAQIEDVTGTEL
GTTGFTAVQLDITEQLEDAMPVYLAVVVGLAIFLLILVFRSLLVPLVAGLGFLLSVGAAFGATVLVWQE
GFGGFVNTPGPLISFMPIFLIGVTFGLAMDYQVFLVTRMREHYTHHNGKGQPGSKYTPVEQSVIEGFTQ
GSRVVTAAALIMIAVFVAFIDQPLPFIKIFGFALGAGVFFDAFFIRMGLVPASMFLMGKATWWMPKWLD
RILPSLDIEGTALEKEWEEKQAAR
>RXS00479 TRANSLATE OF: RXS00479.seq check: 9191 from: 1 to: 2190
MSTSITTENKKKSGPPRLMRIFLPALLILVWLVGAGVGGPYFGKVSEVSSNSQTTYLPESADATQVQEQ
LGDFTDSESIPAIVVMVSDEPLTQQDITQLNEVVAGLSELDIVSDEVSPAIPSEDGRAVQVFVPLNPSA
ELTESVEKLSETLTQQTPDYVSTYVTGPAGFTADLSAAFAGIDGLLLAVALAAVLVILVIVYRSFILPI
AVLATSLFALTVALLVVWWLAKWDILLLSGQTQGILFILVIGAATDYSLLYVARFREELRVQQDKGIAT
GKAIRASVEPILASGSTVIAGLLCLLFSDLKSNSTLGPVASVGIIFAMLSALTLLPALLFVFGRVAFWP
KRPKYEPEKARAKNDIPASGIWSKVADLVEQHPRAIWVSTLIVLLLGAAFVPTLKADGVSQSDLVLGSS
EARDGQQALGEHFPGGSGSPAYIIVDETQAAQAADVVLNNDNFETVTVTSADSPSGSAPITADGIVPLG
SGTAPGPVVVEGQVLLQATLVEAPDSEEAQKAIRSIRQTFADENISAVVGGVTATSVDTNDASIHDRNL
IIPIVLLVILVILMLLLRSIVAPLLLVVTTVVSFATALGVAALLFNHVFSFPGADPAVPLYGFVFLVAL
GIDYNIFLVTRIREETKTHGTRLGILRGLTVTGGVITSAGVVLAATFAALYVIPILFLAQIAFIVAFGV
LIDTLLVRAFLVPALFYDIGPKIWWPSKLSNQKYQKQPQL
>RXS00654 TRANSLATE OF: RXS00654.seq check: 6625 from: 1 to: 1266
VLDILIYPVSGVMKLWHLLLHNVAGLDDSLAWFFSLFGLVITIRAIIAPFTWQMYKSGRTAAHIRPHRA
ALREEYKGKYDEASIRELQKRQNDLNKEYGINPLAGCVPGLIQIPIVLGLYWALLRMARPEGGLENPVF
QSIGFLTPEEVESFLAGRVSNVPLPAYVSMPTEQLKYLSTTQAEVLSFVLPLFITAAILTAINMAMSMY
RSFQTNDYASGFSNGMLKFMIVMSILAPIFPLSLGLTGPFPTAIALYWVSNNLWTLLQTIIMMVILERK
YPLTDDFKVHHLEQRDIYRAKQKEKRIFLWTRRKNRALMILTPWNASTLHATNVELTKTRTAEINEAKQ
ARKEIANKRRETQREMNRAAMQRLKQRRAEVKAKKKGLIDASPNEDTPSENEETKLSSPQVEPTTTAEP
NREPSQED
>RXS00758 TRANSLATE OF: RXS00758.seq check: 161 from: 1 to: 1602
MTLKKSLAVTTAAALALSLAACSSDSSSDSSSSSSGSEGGDNYVLVNGTEPQNPLVPGNTNEVGGGRIV
DSIFSGLVYYDVDGSPVNDVAESIELEGDKTYRITIKDGQTFTDGTPVTAESFVNAWNYNVANSTLSSY
FFESILGYEEGVESMEGLQVVDDTTFTVELTQPESDFPLRLGYSAFFPLPESAFDDMDAFGENPIGNGP
YKLQEWNHNQDATIVPNADYTGGRQAQNDGVKFIFYPTFDSAYADLLSDNLDVLDAIPDSAFSSFEDEL
SGRSINQPSAVFQSFTIPESLEHFSGEEGVLRRQAISLAVNRDEITQTIFEGTRTPATDFTSPVIDGHS
DSLQGADVLTYDPERAQELWAQADEISPWSGEFSISYNADGGHQAWVDATANSIRNTLGIDAIGNPYPD
FKSLRDDVTNRTINGAFRTGWQADYPSLGNFLGPLYGTGAGSNDGDYSNPDFDAKLAEAANAADVDAST
PLYNEAQEILLQDLPAIPTWYSNAVGGYSTNVDNVEFQWNSQPAYYQITKN
>RXS00912 TRANSLATE OF: RXS00912.seq check: 8141 from: 1 to: 273
MDNTLYTAGLTIAAAFFMLSFIFTIYRIIVGPNSIDRLLGLDGTVSMIQCSMATYICWTLDTTVTNFMM
VIALLGFISSVSVARFRKRDGA
>RXS00932 TRANSLATE OF: RXS00932.seq check: 6704 from: 1 to: 474
MTPQKLHRFAALLEMGTWTLLIIGMILKYSGVTDAVTPIAGGIHGFGFLCFAAITITVWINNKWTFPQG
IAGLIVSVIPWAALPFALWADKKGLVAGGWRFSDPSEKPHTFFDKILAQLVRHPIRSILILLVIIAVVF
STLLAMGPPYDPDAIANTVD
>RXS01346 TRANSLATE OF: RXS01346.seq check: 3214 from: 1 to: 1575
MRTATKVIATVMASTLAIGLASCSSSSGTPDVNYVSVNGTEPQRGLIPGDTNENGGGRVVDMLYSGLVY
FDEAGVAQNDLAASIDQETDTTYKITLRDGIKFSDGSDITATDFVDTWNFVVENGLLNTSFFSPIKGYE
EGVETLEGLNVVDDRTFTIELAQPDSEFTQRIGYYGFAPMPASARDDIDAFGENPVSSGPYKLEQWDHN
AELKVVANEHYDGPRAANNDGLKYVFYAQNDAAYSDLLAGNLDVLDLIPPSAYTTYEEELSGRSINQPA
ASYLELSIRMESPNFEGQQGQLRRQAISMAINREEIAEQIFAGTYTPALDFTAPVLDGWRDDLNGNDVL
TFQPDKARELWEDAEEIAPFEGELQISYNADVPNREWVDAVANSISNELDVNATGNPFPDFKSFRDTYR
TTGLDGAYRTAWFADYPSIGNFLGPNYTSGVASNDAKYENPEFDQLIADAAAASTKEETFQAYAQAQEM
LLRDLPAIPLWYPNVVGGYSESVDNVSVNWKAIPVYWAITKQ
>RXS01425 TRANSLATE OF: RXS01425.seq check: 9957 from: 1 to: 885
VLSPDSGITWALSIMFLTFTVRMVLVKPMVNTMRSQRKMQDMAPKMQAIREKYKNDQQKMMEETRKLQK
EVGVNPIAGCLPMLVQIPVFLGLFHVLRSFNRTGSGVGQLEMTVEQNANTPNYIFGVDEVQSFLRADLF
GAPLSSYITMPADAFDAFLGLDVSRLNIALVAAPMILIIVVATHMNARLSVNRQEARKAAGKQQAASSD
QMAMQMQMMNKMMLWFMPATILFTGFIWTIGLLVYMMSNNVWTFFQQRYIFAKMDAEEAAEEEEKRAAK
RTTAPKPGVKPENPKKRKK
>RXS01658 TRANSLATE OF: RXS01658.seq check: 7999 from: 1 to: 1833
DPQILSPTFTQQQQLRNFYGFPDQLAMDRFEVDGKLRDFVVAARELDPNALQQNQQDWINRHTVYTHGN
GFIAAQANQVDEVARDVGSTRGGYPVYTVSDLQSNARAAESEDAEELGIKVDEPRVYYGPLIASATDGA
DYAIVGDTGDGPVEYDTDTSSYTYEGAGGVDIGNMVNRAMFALRYQEMNMLLSDRVGSESKILFERDPR
SRVEKVAPWLTTDSKTYPTVIDGRIKWIVDGYTTLDSLPYSTRTSLTEATQDAVMPDGTPQPLITDRVG
YIRNSVKAVVDAYDGTVELYEFDTEDPVLKAWRGVFPDTVKDGSEISDELRAHLRYPEDLFKVQRDMLA
KYNVDDSGTFFTNDAFWSVPGDPTAAEGRQELKQPPYYVVAADPETGESSFQLITPFRGLQREYLSAHM
SASSDPVTYGEITVRVLPTDSVTQGPKQAQDAMMSSDQVAQDQTLWRGSNDLHNGNLLTLPVGGGEILY
VEPIYSQRKDQASAFPKLLRVLVFYKGQVGYAPTIAEALSQVGIDPKEAQDIEEVDGTATTPSTDETDT
DTDQPATETPTAPVSEAEGIAAINDALSNLEAARDSSFEEYGRALDALDRAVDSYQSAQ
>RXS01677 TRANSLATE OF: RXS01677.seq check: 5194 from: 1 to: 744
VNQQSKKWLVPTLVVIIAVLLIAVVLLMYRGNASDTAEGVSAAATSDSAAASTAASGSASGAADSDLTS
VEARDPSDPVAVGDVDAPVGLVVFSDYQCPFCAKWSDETLPQMMKHVEDGNLRIEWREVNIFGEPSERG
ARAAYAAGLQDAYLEYHNALFANGEKPSEDLLSEEGLIKLAGDLGLDESKFTADFQSPETAVAIAQHQQ
LGIDLGAYSTPAFLLGGQPIMGAQPASVFEAAFEQALAAKE
>RXS02586 TRANSLATE OF: RXS02586.seq check: 4914 from: 1 to: 270
MHLLRDDNWWAPGFVKKAYTVMGHGSEVEEAPRPTTRRLNDDEEVTVHEAVVAGDTVASRGGLSTQENR
DLVSFVELKARLEKRRLEDLD
>RXS02587 TRANSLATE OF: RXS02587.seq check: 637 from: 1 to: 2091
VFSKWGHFAYRFRRIVPLVVIAAILALFVIFGTKLGDRMSQEGWDDPGSSSTAAARIELETFGRDNDGD
VVLLFTAPEGTSFDDAEVFSSISGYLDGLIENNPDEVSHINSYFDTRNQNLLSKDGTQTFAALGLKGDG
EQTLKDFREIEDQLHPDNLAGGVTTEVAGATAVADALDEGMAGDISRAEVFALPFVAILLLIVFGSVVA
AAMPLIVGILSILGSLGILAILAGFFQVNVFAQSVVTLLGLGLAIDYGLFMVSRFREEMDKGTPVEQAV
ATTTATAGKTVVFSAAMVAVALSGLFVFPQAFLKSVAFGAISAVGLAALMSVTVLPSLFSMLGKNIDKW
SLRRTARTARRLEDTIWYRVPAWAMRHAKAVTVGVVLLLLALTVPLTGVKFGGINETYLPPANDTRVAQ
ERFDEAFPAFRTEPVKLVVTGADNNQLIDIYVQANEVEGLTDRFTAGATTDDGTTVLSTGIQDRSLNEQ
VVEQLRAISVPEGVEVQIGGTPAMEIESIEALFEKLLWMALYIVLATFILMALVFGSVILPAKAIIMTI
LGMGATLGILTLMFVDGVGASALNFSPGPLMSPVLVLIMAIIYGLSTDYEVFLVSRMVEARDKGESTDD
AIRYGTAHTGSIITAAALIMIVVCGAFGFSEIVMMKYIAFGMIAALILDATIIRMLLVPRRDAPASRRQ
LVGTRLR
>RXS02590 TRANSLATE OF: RXS02590.seq check: 3473 from: 1 to: 936
MGISLLSSLLKIHGFPVVADFFFALAVVVAIVIIGGWLIYRSPSFKTEVMPAWAMLSMGLIALGTASPV
VLGDDLWGFMFVCWSIGTAVGLVAYSLYITAILRSKAGTPTFAWGLPLVTPMVASTSAAQLHEHFELPA
MLWVSFGLFLLTLASAPAVFTRVYFYYFGPKAQGIPLMATPTSWIPLGMVGQSTAAAQLIGASFGSKTA
ITMGIIYGIIMGIFTIPLGAIAHFVFYRAVFKGATYSPTWWASTFPVGTLSLGAHFLSQSTGVEWFNYF
SLYLIALMLFHVIVSTIAGTIAVMRRIVGKLKSQLA
>RXS02932 TRANSLATE OF: RXS02932.seq check: 938 from: 1 to: 972
VSKTEEGRSAAIIIYAFPTFILLGAIIAFIFPEPFIPLTNYINIFLTIIMFTMGLTLTVPDFQMVLKRP
LPILIGVVAQFVIMPFLAIVVAKMFNLNPALAVGLLMLGSVPGGTSSNVIAFLARGDVALSVTMTSVST
IVSPIMTPFLMLMLAGTETAVDGGGMAWTLVQTVLLPVIIGLVLRVFLNKWIDKILPILPYLSILGIGG
VVFGAVAANAERLVSVGLIVFVAVIVHNVLGYVVGYLTGRVFKFPEAANRTMAIEIGTQSAGLASGMAG
RFFTPEAALPGAVAALVHNITGAVYVGLVRNRPLTKASRKKESVAVSS
>RXS03042 TRANSLATE OF: RXS03042.seq check: 1569 from: 1 to: 606
LVLAFLVLLLVFRSIWVPLIAALGFGLSVLATFGATVAIFQEGAFGIIDDPQPLLSFLPIMLIGLVFGL
ANDYQIFLVTRMREGFTKGKTAGNATSNGFKHGARVVTAAALIMVSVFAAFIAQDMAFIKTMGFALAVA
VFFDAFVVRMMIIPATMFLLDDKAWWLPKWLDKILPNVDVEGEGLSELHEARTEELKENVGVGA
>RXS03075 TRANSLATE OF: RXS03075.seq check: 8649 from: 1 to: 726
VAKFLYKLGSTAYQKKWPFLAVWLVILIGITTLAGLYAKPTSSSFSIPGLDSVTTMEKMQERFPGSDDA
TSAPTGSVVIQAPEGKTLTDPEVGAEVNQMLDEVRATGVLKDADSVVDPVLAAQGVAAQMTPALEAQGV
PAEKIAADIESISPLSADETTGIISMTFDADSAMDISAEDREKVTNILDEYDDGDLTVVYNGNVFGAAA
TSLDMTSELIGLLVAAVVLIVTFGSFIAAGMPLIS
>RXS03124 TRANSLATE OF: RXS03124.seq check: 3878 from: 1 to: 960
MTPTLASMIGLAVGIDYALFIVSRFRNELISQTGANDLEPKELAERLRTMPLAARAHAMGMAVGTAGSA
VVFAGTTVLIALVALSIINIPFLTVMAIAAAITVAIAVLVALSFLPALLGLLGTRIFAARVPGPKVPDP
EDEKPTMGLKWVRLVRKMPVAYLLVGVVLLGAIAIPATNMRLAMPTDGTSTLGTAPRTGYDMTADAFGP
GRNAPMIALIDATDVPEEERPLVFGQAVEQFLNTDGVKNAQITQTTENFDTAQILLPQNLMRSMSAPLR
LSQLFVQMLRPSLMTPARRMALLASPQFTMTSLLASATSWFLTF
>RXS03125 TRANSLATE OF: RXS03125.seq check: 4701 from: 1 to: 171
LVLAFLVLLLVFRSIWVPLIAALGFGLSVLATFGATVAIFQEGAFGIIDDPQPLLCF
>RXS03220 TRANSLATE OF: RXS03220.seq check: 3878 from: 1 to: 960
MGLREILSSKWLVRILLVGIGLGVAQQLTGINSIMYYGQVVLIEAGFSENAALIANVAPGVIAVVGAFI
ALWMMDGINRRTTLITGYSLTTISHVLIGIASVAFPVGDPLRPYVILTLVVVFVGSMQTFLNVATWVML
SELFPLAMRGFAIGISVFFLWIANAFLGLFFPTIMEAVGLTGTFFMFAGIGVVALIFIYTQVPETRGRT
LEEIDEDVTSGVIFNKDIRKGKVH
>RXS03221 TRANSLATE OF: RXS03221.seq check: 3878 from: 1 to: 960
MFRDPAPPSKGTTNLGDKMASTFIQADSPEKSKKLPPLTEGPYRKRLFYVALVATFGGLLFGYDTGVIN
GALNPMTRELGLTAFTEGVVTSSLLFGAAAGAMFFGRISDNWGRRKTIISLAVAFFVGTMICVFAPSFA
VMVVGRVLLGLAVGGASTVVPVYLAELAPFEIRGSLAGRNELMIVVGQLAAFVINAIIGNVFGHHDGVW
RYMLAIAAIPAIALFFG

### Appendix A: DNA Sequences

[0170] >RXA00001-upstream
TGTCATAGGCAGCACTCTAGATGGCGCACAGTGACTCACTTCACTGTTTCTCACAGTACG
GATCGTTCGGCACGTACCTGCCGATGGAGGAGATTCTGCA
>RXA00001
ATGGCAACCGTAACGTTCAAAGATGCTTCCCTAAGCTACCCGGGAGCAAAGGAACCCACC
GTCAAGAAATTCAACCTGGAAATCGCCGATGGCGAGTTCCTCGTCCTCGTCGGCCCTTCC
GGCTGTGGTAAATCCACCACGCTGCGCATGCTGGCCGGTTTGGAAAACGTTACTGACGGT
GCCATTTTCATCGGAGACAAGGACGTTACCCACGTTGCACCGCGTGACCGTGACATCGCC
ATGGTTTTCCAGAACTATGCTCTCTACCCCCACATGACCGTGGGCGAGAACATGGGCTTC
GCACTGAAGATCGCCGGCAAGTCCCAAGACGAGATCAATAAGCGCGTCGACGAAGCCGCC
GCCACTTTGGGCCTGACCGAATTCTTGGAGCGCAAGCCGAAGGCCCTGTCCGGTGGTCAG
CGTCAGCGTGTGGCCATGGGCCGCGCCATTGTTCGCAACCCGCAGGTCTTTCTCATGGAT
GAGCCGCTGTCTAACCTCGATGCCAAGCTGCGTGTTCAGACCCGTACCCAGATTGCAGCC
CTGCAGCGCAAGCTTGGGGTTACCACCGTTTACGTCACCCACGACCAGACGGAGGCCTTG
ACCATGGGTGACCGCATCGCGGTGCTGAAGGATGGCTACCTGCAGCAGGTTGGCGCGCCC
CGAGAGCTTTATGACCGCCCCGCCAACGTCTTCGTCGCCGGCTTCATCGGCTCCCCAGCC
ATGAACTTGGGCACCTTCTCGGTCAAGGATGGTGACGCTACCTCTGGTCACGCTCGCATC
AAGCTTTCCCCGGAAACCCTCGCGGCCATGACGCGGGAGGATAATGGCCGCATCACCATT
GGTTTCCGCCCGGAGGCACTGGAGATCATTCCGGAAGGCGAGTCCACCGATCTTTCCATC
CCAATCAAGCTCGACTTCGTGGAGGAACTCGGTTCCGATTCCTTCCTCTACGGCAAGCTG
GTAGGCGAGGGCGACCTTGGATCGTCCAGCGAGGATGTCGCCGAGTCCGGCCAAATCGTC
GTCCGCGCTGCTCCGAACGCCGCGCCTGCTCCGGGCAGTGTTTTCCACGCACGCATCGTG
GAGGGCGGCCAGCACAACTTCTCGGCGTCGACTGGCAAGCGCCTCCCT
>RXA00001-downstream
TAAGCCCGCGTACCGGCTACCCC
>RXA00002-upstream
CTGACTTCTTGGGCTTCGGTGCTGCAATATCTAGGTTCACGCCCCGGATGGCACCGGAGA
GGCTGCAGACAAGCTCGCTGCTGAGGATTCTCACCTGCAC
>RXA00002
GTGCTGCACCGCGAAGGCAAGGGTGGCCTTCTTGGCGCTTATATCGCCGGCTTCGAGTGG
GGCCTAGAGAAGGATTACCATGTTCTGTGCGAAATGGATGCCGACGGCTCCCACGCACCA
GAACAGCTCCACCTCTTGCTTGAGGAAATTGAAAAGGGCGCAGATCTGGTCATTGGCTCC
CGCTACGTACCGGGTGGAGAGACAGTGAACTGGCCTGCCAACCGCGAACTGCTGTCCCGC
TTGGGCAACAAGTACATTTCTGTTGCCCTGGGTGCCGGCATCAATGACATGACTGCGGGC
TACCGTGCTTTCCGGCGTGAGCTGCTTGAGCACCTCGACTTTGAGGAGCTTTCCAACGCC
GGATACATCTTCCAGGTGGACGTTGCCTTCCGCGCCATCAAGGATGGCTTCGATGTCCGC
GAGGTTCCGATCACCTTCACCGAGCGCGAGCTTGGTGAATCCAAGCTGGACGGCTCCTTT
GTCAAGGATTCCCTGCTCGAAGTAACCAAGTGGGGAGTGGCTCACCGCTCCGAGCAGATC
AGCGATTTCACATCGGAAGTATCCAAGATCGCCTCCCGCACGGTCAAGGACATGGAGCTT
GGGCCTAAGGCCACCACGGCCAAGAACGGTGTACCGGACTTCGTTTGCGAAGTCTCTAAC
CTAGCTAAAGGCACCTTCAAGAAG
>RXA00002-downstream
TAACTCGATGCCCGCGGCGTCTC
>RXA00089-upstream
ACCTCGTTTTGGCCGCAAGTTCTCGTTAGTTAAAAACTGTAGGAAACCAGGTTCCACACA
TGACACACAATCGGTTTAACAGGGAAGGGGATCGGCACTG
>RXA00089
ATGGCAACACCAGCATCGGCTCCCACTTCCGAACCACGTCTCAAACGCACCAGAGCCAAG
CTTTTTGATTGGAAGCTTCTCATCGGCATCATTTTCGTCGCCGGCCTCGTGGTGCTTTCC
CTCCTCACCGGCCAATACGACATTTTCGGTGGCGATGATGGCCAACTGATGTTCGAGGCA
GTTCGCATCCCGCGTACCGTTTCCCTCATTTTGTCCGGTGCAGCAATGGCGATGTGTGGC
TTAGTCATGCAGCTGTTGACCCAAAAGAAATTCGTGGAACCCAGCACCACAGGAACAACC
GAATGGGCAGGTCTTGGCCTGCTCTTCGTGATTTACTTCGTGCCAGCCGCGACCGTTTTG
GATCGCATGCTCGGTGCCGTGGTGTTTTCCTTCATCGGAACCATGGTGTTCTTCCTCTTT
CTACGCCGAGTAACACTGCGTTCCTCATTGATCGTCCCGATTATCGGCATCATGCTCGGT
GCCGTGGTGTCATCGATCTCCAGCTTCTTCGCCTTGCAATTCGACATGCTCCAGCAATTG
GGAACATGGTTTGCGGGTTCCTTTAATACAGTGTTCCGCGGACAGTACGAAGTGCTGTGG
ATCGTTGTCATCGTCGTTATTGGAGTGTTCTTCTTCGCAGACCGGCTCAGCGTAGCTGGC
CTTGGCGAGGAAATCGCGACAAACGTGGGTCTCAATTACAACCGCATGGTCCTTATCGGA
ACTGGCCTCATCGCCATCGCAACAGGTGTGGTCACCGTCGTGGTTGGTAGCCTGCCATTC
CTCGGACTCATCGTGCCCAACGTTGTGTCCATGTTCCGTGGCGATGACCTGCGCTCGAAC
CTGCCATGGGTATGCCTAACCGGCATCGCGATCGTAACCATTTGTGACTTGATCAGCCGA
ACCATCATCGCGCCTTTCGAAATTCCAGTTTCAGTAATCCTGGGCATCATCGGCGCAGTG
GTCTTCGTGATCATGATTGTGAGGCAACGTGGCCGTGGA
>RXA00089-downstream
TAAAGATATTGAAAACCGCACCT
>RXA00090-upstream
TTGATGAGCCGAACCATCATCGCGCCTTTCGAAATTCCAGTTTCAGTAATCCTGGGCATC
ATCGGCGCAGTGGTCTTCGTGATGATGATTGTGAGGCAAC
>RXA00090
GTGGCCGTGGATAAAGATATTGAAAACCGCACCTCAGACCTTTCTCGATGGGAAACTATG
GAGGAATCAGCAACGGTCGAGGGACGCACCGATGTCGAACTAGCATCAGCGCCGAGCAAA
CGACGCAGCTCAGGTGCATTCCAAAGAGCGCGCGGGAAGCGCCGCTACTGGATCATCATG
GCCGCGCTGCTGGTCACCGCGCTTGCCTTCACCTGGGGCCTCATTTGGTACAAGAACGCG
ATGCCCGTTGGGCATCCGGCCTTCGCGCTGATTGCAGAACGAGGCATGGAGTCGGTCTTT
GTCATGCTGATTGTTGCGGTTTGCCAAGGCTTTGCGACGGTTGCGTTCCAGACCGTCACC
AACAACCGCATTATCACGCCGTCGATCATGGGCTTTGAATCTCTCTACACACTGATTCAT
ACCTCCACAGTGTTCTTCTTCGGCGCAACTGCACTGCTGGCCACCAGAAATCTCGAAATG
TTTGTCGGCCAGCTGGTGATCATGGTTCTTTTGACCTTGGTCCTCTACACCTGGCTGCTT
TCCGGAAAACGCGGCGATATGCACGCCATGCTGCTTGTCGGCATCATCATTGGTGGCGGA
CTCGGATCCATCTCCACCTTTATGCAGCGCATTCTGACCCCATCAGAATTCGATATTCTT
TCCGCCCGACTTTTCGGATCAGTAAACAACGCGGAAACCGAATACTTCCCAATTGCTGTT
CCACTAGTAGTAGTGGCGTCCGTCTTGTTGCTGCTAAGCTCTCGACGCCTCAACGTTGTA
GGGCTTGGCAAAGATGCCGCAACCAACCTTGGAATTAATCACCGACGATCCTCCATTTAC
ACACTGGTTCTCGTCTCTGTATTAATGGCAGTATCCACCGCACTTGTCGGACCGATGACA
TTCCTCGGATTCTTGGTCGCGACCTTGGCATATCAATTCGCCGACACTTACGACCACCGA
TACATCCTTCCGATGTCCGCACTCATCGGATTCGTCGTACTCAGCGGCGCTTACTTTGTC
ATGAACCAGGTGTTGGGCGCAGAAGGCGTCGTGTCCATCATTATTGAGATGGTCGGCGGT
ACCGTGTTCCTCATCGTCATCCTCAGAAAGGGGAGACTG
>RXA00090-downstream
TGATTACGTTAAGTAATGTCGGC
>RXA00099-upstream
CTCTGGTGAAGAGGATGTTGAGTCGGGAGATTCTTCCACTGATTCACTGATTAAGTGGTA
CCGCGCAAATAGGTAGTCGCTTGCTTATAGGGTCAGGGGC
>RXA00099
GTGAAGAATCCTCGCGTCATAGCACTGGCCGCTATCATGCTGACCTCGTTCAATCTGCGA
ACAGCTATTACTGCTTTAGCTCCGCTGGTTTCTGAGATTCGGGATGATTTAGGGGTTAGT
GCTTCTCTTATTGGTGTGTTGGGCATGATCCCGACTGCTATGTTCGCGGATGCTGCGTTT
GCGCTTCCGTCGTTGAAGAGGAAGTTCACTACTTGCCAACTGTTGATGTTTGCCATGCTG
TTGACTGCTGCCGGTCAGATTATTCGTGTCGCTGGACGTGCTTCGCTGTTGATGGTCGGT
ACTGTGTTCGCGATGTTTGCGATCGGAGTTACCAATGTGTTGCTTCCGATTGCTGTTAGG
GAGTATTTTCCGCGTCACGTCGGTGGAATGTCGACAACTTATCTGGTGTCGTTCCAGATT
GTTCAGGCACTTGCTCCGACGCTTGCCGTGCCGATTTCTCAGTGGGCTACACATGTGGGG
TTGACCGGTTGGAGGGTGTCGCTCGGTTCGTGGGCGCTGCTGGGGTTGGTTGCGGCGATT
TCGTGGATTCCGCTGTTGAGTTTGCAGGGTGCCAGGGTTGTTGGGGGGCCGTCGAAGGTT
TCTCTTCCTGTGTGGAAGTCTTCGGTTGGTGTGGGGCTCGGGTTGATGTTTGGGTTTACT
TCGTTTGCGACGTATATCCTCATGGGTTTTATGCCGCAGATGGTAGGTGATCCTCAGCTC
GGTGCGGTGTTGTTAGGCTGGTGGTCAATTTTGGGATTGCCGCTGAACATTCTGGGACCG
TGGTTGGTGACGCGTTTCACTAACTGCTTCCCGATGGTTGTTATCGCCAGTGTCATGTTT
CTCATCGGTAATGGTGGGTTTTGTTTGGCTCCGGATGTTGCGCCGTGGTTGTGGGCGACG
TTGTCTGGTCTTGGTCCCCTTGCGTTCCCGATGGCGTTGACGCTCATTAATATTGGTGCT
GAAACTAGTGCTGGTGCTTCTGCGTTGAGTTCCTTCGGGCAGGGTTTGGGTTATACGATT
GCGTGTTTCGGTCCCTTGTTGACTGGTTTCATTGTCGATGCAACAGGCAGCTTCCGAACA
ATCTTTTTGCTTTTTGCGCGTGCAACACTCTTCGTTATTAGAGGCGGTTACTTTGCGACA
AGGCAGGTTTACGTCGAAAAGCTTTTAAATCGC
>RXA00099-downstream
TAGGATGGCGCTATGCCGCAAAG
>RXA00123-upstream
GAAGGATCGTCAGAATAGCTCTCGAATAGGCCATTTCTTACTTCATCGGCAATACTGACT
TAGTAGAAATTGCTGTCCAGAACTGTTGAAGGAGTTGAAA
>RXA00123
ATGCCAAAGAATTACGACATCAACGGGGCGATCCGCAGACGGGATATGCTCAGACGTCGG
TACCTTCCTGATTCGGCAAATTCAACTCCTCTACCTGAAGACGTTTCTCCGCTGACCCGC
TATGTCACCGACGGCATCCCGAAGCGCCCACCGCTGGGTGCCACTGTTGCTGACGGTTTA
AAATTCGCGGAAGGCGCCTCCAACCGCATGGTCATGTCGCTGTACCCTGCGGCATCCAAG
CCCGCAATCGAGGAATTGGCAGAGGCCTGGGACCTCCACCCCACCATCGTAGAAGACTTG
CTCCTTGGTCAGCAGCGCCCAAAACTAGACCGCTACGAAGACATCATTTTTATCGCGATC
CGCTCCGCGCGCTACATCGACTCCCGCGAAGAGGTGGACTTCTCCGAATTCCACATCCTC
ATGAAGCCTCAGGCCATAGCCATTTTGTGCCAGGATAACCAATGGATTGACGGCACCAGC
GCCGCCAGCTTCAGCAACCCCGAGGAGATCGATAAGCGCATAAAAACATTGCTTGCCGAC
GCCGAGTTACTCTCGTCCGGCCCCCGCGCCGCGGCCTATAGGCTTCTCGACGCCATCGTC
GACGGCTTCTCCCCCGTTCTTAGAGGCATCGCCATCGACCAGGAACAGATTGAGCGCCAG
GTGTTCTCCGGCGACGCCGCCGTCGCCGAACGTATTTACAACCTGTCCCAAGAAATCATC
GACATGCAGCACACCACCAGCTCAGTTACCGAAGTGGTGCAACGCCTCAACAAAGACTTC
ATCCGAAGTGGCATGTCCGAAGAACTCCGCGCCTACCTCGACGACGTCGCCGACCACCTC
ACCCGCGACAACACCCGCGTCTCCGAATACCGCGAATCCCTATCCCAAATTTTGAACGTC
AACGCCACCCTTGTAGCCCAACGCCAAAACGAAGACATGAAGAAAATCTCCGGATGGGCC
GCCATCATCTTCGCCCCAACCCTCGTGTCCTCCATCTACGGCATCAACTTCGACATCATG
CCAGAACTTCACTGGGCGTTTGGCTACCCGTTGGCTCTCTTAGCAATGCTCGGATTCACC
CTCCTTTTGTACTGGATCTTCAAACGCAGTAAGTGGATG
>RXA00123-downstream
TGAGACAAAAACCGAAAAACCAA
>RXA00160-upstream
TACAGGGGTGGGGTTACCCCCTAAGGTGGTCACAACTTGATAACGGACTGGTTAATAAAT
GGCCAATCTGACCATTTTAACCTCCATAAAAAGGATTCTC
>RXA00160
ATGCTAAACATCGCACGCAACCGCAACATGAAGCGTCGACTAGCAATTGCTGCTTTCGTC
GCCACCGCAACCGCTACCGCCACCATGGCACCAGCATCCGCGCAAACCGACTACGCAGGC
CTTTCCTCCGGCGTTGCCGACACCGTCGCAGAAGCTGCAGGAGTCGCAACCACCGCCGTC
GCACCAGCCGCCACCGTAGCGCGCCCAGCAAACGGCACCTTCACCTCAGGATTCGGACCA
CGTTGGGGAACCTTCCACAACGGCATCGACATCGCAAACTCAATCGGCACCCCAATCTAC
GCCGTCATGGCCGGCACTGTCATCAGCTCTGGCCCAGCATCCGGCTATGGACAGTGGATC
CGCATCCAGCACGACGAGGGATCCATCTCCATCTACGGACACATCGAATACCTCTACGTC
TCCGTCGGCGAACGCGTCGCAGCAGGGCAGGAAATCGCACGAATGGGCAGCCAAGGATTC
TCCACCGGCTCCCACCTCCACTTCGAGATCCACCCAGACGGCGTCACGCGAGTCGAGCCA
CAGGCATGGCTCGCAAACCACGGCATCTACGTT
>RXA00160-downstream
TAAGCGCTAGCCGTTCGTGGGAT
>RXA00193-upstream
CCTCAGCGTCCTCTCCTCAGCGCCTTCCCCGCTGGGAAACGTGTGGCAGCACCTGAAATT
AAGGTTTCACCACC
>RXA00193
ATGCAAGGAACGCTGAAGAAGTAGTTCCCAGTCTTTGTCTTGCCCACCCTTCTGGGATTC
ATGATTGCGTTCTTGGTGCCGTTCATCGTGGGTTTCTTCCTCTCCTTTACGAAGTTCACC
ACTATCACCAACGCCAAGTGGGTTGGCATAGACAACTACGTCAAAGCTTTCTCCCAACGC
GAAGGTTTCATCTCAGCCTTCGGTTTCACCGTCCTCGTGGTCATCGTCTCCGTGATCACA
GTCAACATCTTCGCCTTCCTCTTGGCGTGGTTGCTGACCCGCAAACTCCGCGGTACCAAC
TTTTTCCGCACAGTCTTCTTTATGCCGAACCTTATCGGCGGCATTGTGCTGGGTTATACC
TGGCAGACCATGATCAACGCCGTGCTTTCGCACTATGCCACGACTATTAGCGCGGACTGG
AAATTCGGCTACGCCGGCCTCATCATGCTACTTAACTGGCAGCTCATCGGCTACATGATG
ATCATTTACATCGCCGGCCTGCAAAACGTCCCACCAGAGCTCATTGAGGCTGCCGAACTC
GACGGCGTCAACAAGTGGGAGATGCTGCGGCACGTCACTATTCCGATGGTGATGCCATCC
ATCACCATCTGCCTCTTTTTGACTTTGTCGAACTCCTTTAAGCTCTTCGACCAGAACCTG
GCGCTGACCAACGGCGCTCCTGGCGGGCAAACTGAGATGGTGGCGCTCAACATCATCAAC
ACGCTGTTTAACCGTATGAATGTCGAGGGCGTCGGTCAGGCCAAGGCCGTTATCTTCGTC
GTCGTTGTGGTCGTCATCGCGTACTTCCAGCTGCGCGCGACCCGCTCCAAGGAAATCGAG
GCT
>RXA00193-downstream
TAAGTTATGACTACCAGCAGTTC
>RXA00203-upstream
AGGAAGCTGCTGCAGAAATCGAAAACACAAAGGAGGACCGTTGAGCACCGCCGTAGTTTC
ACAGAAGAAGTCGACAACGGCATCCAAAATTGGACATTGG
>RXA00203
ATGCTCAATAACGGTGCGTTGGTGGGGCTGATTGCACTGTGTGTTGGACTTTTTATTGCA
ACACCCCACTTTCTCACCATTCCTAACCTGATCAACATCGGTATCCAATCGGCGACGGTG
GCGATCCTGGCGTTCGGCATGACCTTCGTCATCGTTACCGCAGGCATTGATTTGTCTGTG
GGATCAGTGGCTGCGTTGGGTGCGATGACCTCGGCGTATTTCTTCGCGGAAGTTGGTTTG
CCGGGCTGGATCACGCTGCTGATTGGCCTGTTCATCGGATTGTTGGCGGGTGCGATCTCT
GGCATTTCTATTGCTTATGGCAAGTTGCCTGCGTTTATTGCCACCTTGGCCATGATGTCG
ATCGCCAGGGGAATCACCTTGGTCATTTCCCAAGGCTCACCAATTCCCAGTGCACCAGCT
GTGAACGCTTTGGGGCGCACCTAGTTTGGCATCCCGATGCCGATTCTGATGATGGCACTG
GCTGGCATTGTGTGTTGGTTTATTTTGAGCCGCACCGTGCTGGGACGGTCCATGTACGCC
ATTGGCGGAAACATGGAAGCAGCGCGACTATCTGGTCTGCGAGTGAAGAAAATCCTGGTC
ATGGTCTATGCACTGGCTGGTGTGTATGCAGCACTTGCGGGTCTGGTCATGACGGGACGC
TTGTCGTCCGCGCAGCCGCAGGCAGGCGTGGGATAGGAACTCGATGCGATTGCCGCCGTG
GTCATTGGTGGTGCGTCACTTGCTGGCGGAACCGGAAAAGCAACGGGCACTTTGATTGGT
GCCATCTTGTTGGCCGTGATGCGGAATGGCTTGAACATTTTGAACGTGTCCTCGTTCTGG
CAGCAGATTGTCATCGGTTGTGTCATCGGGCTTGCGGTGGGCTTGGATGTCATGCGAAAC
AAAACCTCTAAG
>RXA00203-downstream
TAATTCCTGAAAGGAAATTTTCA
>RXA00204-upstream
TCAACGGCGGTTTCCCAAAAGGCGGCCGCAAAGGCAGCAAAAGCAGCCCAAAAAGCAGCC
GCGAAAGCCGCACAGAACACGCAACACGAGGTGAGCCTAG
>RXA00204
ATGGTGAACTCTGAACAAGCGCTTCATCAGGATGATCCTGGACCAATCCTTCAGTTGGAT
AAAGTCTCCAAGTCGTTTGGCCCAGTCAACGTGATTAATCAAGTGAGCATCGATGTTCGC
CCTGGCAGGGTGCTTGCGCTGTTGGGTGAAAATGGTGCGGGTAAATCTACGCTGATCAAG
ATGATGTCGGGTGTGTATCAGCCTGATGGCGGGCAGATTTTGGTGGATGGAAAGCCCACG
ACTTTGCCTGATACGAAAACTGCTGAGTCTTTTGGCATCGCTACGATTCACCAGGAATTG
AATCTGGTGCCCACGATGACGGTGGCGGAAAACGTCATGCTGGGCCGCACTCCTCGGAAG
TGGGGTTTGGTCAATTTGAAACATTTGCGCAGGGAGGCACAGGCGGCGCTGGATCTCATC
GGCGTGGATGTGGATCTGAATGCTCAGGTGGGTTCTTTAGGAATCGCTAGGCAGCAGATG
GTGGAGATCGCGAAGGCGTTGTCCATGAATGGGCGGATATTGATTTTGGATGAGCCCACT
GCAGCGTTGACTGGTCGTGAAATTGATCAGTTATTCAAAGTGGTGGATGAGGTGAAAGAA
AAAGGCGTGGCCATGGTGTTTATTTCGCACCACTTGGATGAGATCGCGCGCATCGGCGAT
AGCGTCTCTGTGCTGCGTGATGGCGAGTTCATCGCGGAGCTGCCAGCGGATACTGATGAA
GATGAGCTGGTGCGGCTGATGGTGGGTCGTAGCATTGAAAACGAGTATCCGCGTAGTGCG
CGAGAGATCGGGCAGCCACTGTTGGAGGTGAAAAACCTCAACGCGGAGGGCCGGTTCACG
GATATTTCCTTGACTGTTCGCGCTGGTGAAGTCGTAGGCCTTGCCGGTCTTGTGGGTGCT
GGTCGCACGGAAGTGGTTCGCTCGATTGCTGGCGTGGACAAAGTTGATTCCGGTGAGGTG
ATCGTTGCTGGCAAGAAATTGCGCGGCGGCGATATTTCCGAGGCTATTAAAAACGGCATC
GGGCACATTCCGGAAGATCGAAAAGCCCAGGGCCTGGTGCTGGGGTCGTCTGTGGAGGAC
AACCTGGGATTGGCGACTTTGGCGTCGACAGCCCGCGCAGGTTTGGTCGATCGATCAGGA
CAGCACAAACGAGCCGCCGAGGTCGCGGAAAAACTCCGCATCCGGATGGCAAGCCTCAAA
CAACCGATTAGCGATTTATCGGGCGGCAATCAGCAAAAGGCCGTGTTCGGCCGCTGGGTG
CTTGCCGGGTCAAACGTGCTGCTTCTCGACGAACCGACCCGTGGCGTTGACGTCGGCGCG
AAGGTGGAAATTTACAACATCATTAATGAGATGACGGAAAAAGGTGGCGCTGTGCTCATG
GTGTCATCGGAGCTTCCCGAAGTCTTGGGCATGGCTGATCGCATTTTGGTCATGTCTGGT
GGACGCATCGCAGGCGAACTGCCAGCGAAGGGAACAACCCAGGACGATGTCATGGCTCTA
GCTGTTTCCCAGGTGGATGATTCCATCACCGAGGAAGCTGCTGCAGAAATCGAAAACACA
AAGGAGGACCGT
>RXA00204-downstream
TGAGCACGGCCGTAGTTTCACAG
>RXA00270-upstream
TGGAGACTGCAACTGAGTTCACCTACGTGATCAACGAAGATGCAGGAGAGCGCCAGGGGG
TGGAGATCCCTCAAGAGATTTTGGATAAGGCCGAACGCGT
>RXA00270
ATGATCGGCGCTTTTGAGTTCGGATTGTTGTACGGAGTTGTCGCATTGGGCGTCTATTTG
ACGTTCCGTGTGCTCAACTTTCCCGACCTCACCGTTGACGGCAGCCTGACCACTGGCGCG
GCAACAGCTGCGACAGCTCTTATGTCTGGCTGGCCTCCCCTTATGGCTACTGCCGCTGGT
TTCGTTACTGGCTTTATCGCTGGCATGATCACCGGTTTGCTGCACACCAAGGGCAAGATC
GATGGTTTGCTCGCAGGTATTTTGACCATGATTGCGTTGTGGTCGGTTAACTTGCGCATC
ATGGGTGGCGCGAACGTGCCATTGTTGCGCACCGATAACCTCTTCACCCCGCTTCGCGAC
GCCGGCCTCCTCGGCACATGGGCAGGCCCGGCGATCCTCGCCGTTGCAGTGGGAATTTTG
GGACTCATCGTCATCTGGTTCCTCAACACTGATATCGGACTGTCGCTGCGATCCACCGGC
GACAACGGGCCGATGGTGCAGTCCTTTGGTGTTTCAACGGATTTCACCAAAATCCTCACC
ATCTCCCTGTCCAATGGTTTTGTTGGTCTTGCCGGTGCACTCATCGCTCAGTACCAGGGC
TTCGCAGATATTTCGATGGGTATTGGCCTCATCGTGATCGGTCTCGCATCGGTTATTTTG
GGCCAGGCCATCTTCGGTCAGCGTCGCGTGTGGTTGGCTGTGTTGGCTGTCATCGTCGGT
GCCATCGCGTACCGCCTGATCATTTTCGCAGCACTGCGCGTTGGCCTTGACCCCAACGAT
ATGAAGGCAATTTCTGCGATCTTGGTGGTTGTCGCCATGCTGCTGCCGAGGTGGCGTGCG
AAGTTCTCCAAGGCACCGAAGCGTAAGCAACCAGTAGCAGTGGAGGCT
>RXA00270-downstream
TAAGACATGTTATCCATCAACGG
>RXA00311-upstream
CGGAGAGATCGGCATTTGGGCGACCGTGCTGTTGATGATCGCCCGCATCGCATAGGGATT
CTGTGCAGTGGCAGAAGCTGCAGGTGCATCCACACTGACC
>RXA00311
ATGGAACATTCTCGTGAAGGCAAGCGTGGATTCTTCACCTCATCGGTGATGGCGGGTTGC
TCAGTTGGAAACGTCGTGGCTGGCTTGGTATTTATCCCGTTCTTGATGCTGCCGGAAGAA
CACCTCATGTCATGGGGCTGGCGCGTACCTTTGCTGCTTTCCGCACTGGTTTTAGTTGTC
GCATACTTCGTGCGCACCCGACTGGAGGAAGCATGAACTGAGAAGGCGGAAGAGGACGCA
GGCGCTCCGGCTTTGGCTGTGCTGCGCACCCAGGGCATTGATGTCGCACGAGTTTTCCTG
ATCACCTTCTTCGCCGTTGTTCAGACCACTTTGAACGTTTACGCACTGGCATACGCCGCC
AACGAAATCGGCATCGATCGTTCCTTCATGGTGATGGTGAACACGATCGCGCTGGGGCTT
TCCATCGGAAGGATTCCTTTGGCCGCGTGGGTCTCTGACCGCATTGGCCGCAAGCCAGTC
TTGCTGTTCGGGGCCATCACCTGTGCAATCACCACCTACTTCTACTTCCAGGCAATCTCT
GAAGCTGACCTTGTGCTGATCTTCGCACTGTGCTTGGTCAACCAAGGTTTGTTCTACTCC
TGCTGGAACGGCGTGTGGACCATTTTCTTCCCAGAAATGTTCGCATCTTCCGTGCGCTAC
ACCGGCATGGCTATGGGCAACCAGCTCGGTCTGATCATCGTTGGTTTCGCACCAACCATC
GCCACCGCCCTGTACGCATGGAACGGTTGGGAAGCTGTTGCGGGATTCATCATCGGCGCA
ATCGCACTGTCTGCCGCAGTTATTTTGACCACCAAGGAAACCGCCTTCACCAAGCTTGAA
GATCTAGGGAAGAAA
>RXA00311-downstream
TAATGTCTGACAAGATCTGGAAA
>RXA00312-upstream
CCATTGAATGGGAAGAACTTGGTTGTGTGTTTGTGACACCTATTCTAAAGAACATTAAAC
GTGATTAAGTTCATGATTCTTAATGAGAAAGGGTGATCAC
>RXA00312
ATGGAAACCGTGAGGACCGCAACCGCCGCTCCTGAAACTGCATCTTTGAAGCTGCGTGAG
GCAGAAAGCCCAGCAAAGTCCCCAAAGAAAGCCGCCTTGGCGTCACTTTTGGGTTCGACT
CTGGAGTACTACGACTTTGTCATTTACGGCACCGCCTCCGCGCTGCTGTTCAATCACCTC
TTCTTCCCACAGGGCGACCCAGTCGTCGCGACGATCGGCTCTCTCGCCTCATTCGGTGTT
GCGTACATTGCGCGCCCCATCGGTGGTCTGGTGATGGGACATGTTGGCGATAAGATCAGT
CGCAAAACCGCCCTCATGGTGACGTTGATGATCATGGGTATCGCCTCCATTTCCATCGGA
CTTCTGCGCACCTACGGACAGATCGGCATTTGGGCGACCGTGCTGTTGATGATCGCCCGC
ATCGCA
>RXA00312-downstream
TAGGGATTCTCTGCAGTCGCAGA
>RXA00345-upstream
AGTGACCCATATGGCGTATCCGAGGTCTAACGCGATTTTGCGATTTTCAATAAGTTTTCA
TGTTGACATCCTTTTTCAATAAGCATTTA
>RXA00345
ATGGCAGGTATGAAAAAGCTTCTTTGGACACTCCCCATCCTCCCACTGGTACTAGCTGGC
TGCTCAACTGGATCAGCAGATTCCGCGGATTCCACCAACGCTGCCGGATCCAATTCCCTT
AAAGTGGTCACCTCCACCCAGGTGTGGGCTGACGTCGCCGAAGCTGTCGCCCCAGATGTA
GACATTGAAGCAATTATTACCGGTGGCGACATCGACCCTCATTCCTTCGAGCCTTCCGCT
ACCGATATGGCTAAAGTTTCCGAAGCTGACATCATTATCGTCGGTGGCGGCGGCTATGAT
TCCTGGCTCTACGGCACCTTGGAAGAGGATGATCGCATCATCCACGCATTGGATCTCTCA
GAGCATGACCACAGCGAGCATGATGATCACGAGCACGAAGCCGAAGAAGCCGACGAACAC
GACCACGATGAAGAGGGCCACGATCATGACGTCGACAACGAGCACGTCTGGTACTCCACT
GAATACGTCTCTGAGGTAGCTGAAGAGTTCGCAGAAAAAGTCACCGAGCTTGATCCCGAG
GCACAGGCCGATGCAACGGCTGTGACCACCAAGATGGACGAGCTGCACAATCAGATTCAC
GATCTTCCAGCAGTTCGCATTGCTCAGACCGAGCCGATCGCCGATCACATTTTGTCCCAC
TCCGACATGGTGGAATCCACCGGTGAGGGTTACCGCGCAACCACGTTGAGCGAGAGCGAG
GCAACGGCAGCAGATGTTGCGTCGTTCCAGGATGCAATTAACAACGGTGACCTGGATGTT
TTGATGTACAACCCACAGTCCGCGTCGACTGTCGCGACCAGCTTGAAGGATTTGGCAGAA
GAAAAAGGCATCCCAGTTGTTGAGATCTATGAGACCCCTCAAAACACCGAGAATTTCCTC
GATGCATTCACCAAGGCAGTTGATGATCTCACCGCTGCCACTAACCAGGTT
>RXA00345-downstream
TAGAATTATTTAAATGGTGTTGA
>RXA00378
AAATCCTGGCGGTCATATCCGTCCTGGTTCGCTTTTGACCACGGCACGTTGACCCAAAAC
GAGATTTATTTTGATGTGGCCTGCGGAATCACCGTGTTGCTTCTTGCCGGACGGCTGCTG
ACAAGGCGTCGAAGCCAATCCAGTTTGTTAGCGGAACTTGGTCGCCTCCAAATCGATCCA
CAGCGCATTGTCACTGTGGTGCGTAAACACCGATTGAAGCGCGTAGTCCAGGAACTGAAC
ATTCCAGTGCAGGAAGTCCGTGTCAATGACGATGTGAAAGTTGCACCTAATACCACGATC
CCTGTGGATGGCACTGTCATCGGTGGCGGTTCGCGGATCGCAGCTAGCATCATCATGGGA
CAAGACCAGCGTGATGTAAAAGTAAATGACAAAGTTTTCGCCGGCAGCCTCAACCTCGAA
TCCGAAATCAAGGTTGGTGTTATTCGCACTGGTCACCGCACCCGCATCGCCGCGGTACAT
AGGTGGGTTAAAGAAGCGACGTTGAAGGAAAACCGCCACAATAGGGCAGCGATCCGTTCG
GCCGGTAACCTTGTGCCCATCACGTTCACCCTTGCTGTGGTGGACTTCTGTCTGTGGGCA
CTGATCTCTGGAAACATCAACGCTGCATTTACCACTACCTTGGCTGTCCTTGCGTGGGTG
GCTCCGGTGGCCTTAGCGTTGTCTGCTCCACTTGGCACGAGGAATTCGATCGAAGCTGCA
GCACGACACGGTATTTTGGTCCGCTCTGGTGAAATTTTCCGAGTTCTCGATGATGTGGAT
ACTGCCGTATTTAATCGTGTGGGCACACTkACCGATGGCGAAATGACAGTGGAAACCGTC
ACAGCAGACAAAGGCGAGGACCCAGAACTAGTGCTGCGTGTCGCCGGGGCGTTGGCGATG
GAATCCCACCACGCGATTTCCAAAGCACTGGTGAAAGCATCCCGTGAAGCTCGTGATACC
GGCGCGGGTGGTGAAGATGTCCCACACTGGATTGAAGTAGGCAACGTGGAAATCACGGAA
GCCGGCTCATTCCAAGCAACCATCGAGCTGCCACTGATCAAACCATCTGGCGAAAAAATC
ATGCGCACCACAGAAGCACTCCTGTGGCGACCACGATCCATGACAGAAGTCCGTGAGCAC
TTAAGCCCCCGACTAGTGGCAGCAGCAACCTCAGGTGGCGCACCACTGATCGTGCGATGG
AAAGGCAAAGACCGCGGAGTTATCACTCTAAGTGACCACGTGAGATCAGATTCCTCCGAT
GCGATTATTGCGATTGAAGAACAAGGCATCGAGACCATGATGCTTTCACGTGATACTTAC
CCGGTGGCACGTCGATACGCAGACAGCTTAGGCATCACCCACGTCTTGGCCGGCATCGCG
CCGGGCAAGAAAGCCCAGGTCGTCCGTGCAGTCCACACCCGCGGATCCACTGTCGCGATG
ATCGGCGATGAATCAGTAATGGACTGTTTGAAAGTCGCTGACGTGGGTGTACTGATGGGC
GTCGATCGTCCCTCAGATCTGCGTGATGATTCCGATGACCCGGCAGCTGACGTTGTGGTC
ATGCGCGAAGAGGTCATGAGCGTGCCGACGCTGTTTAAACTGGCTCGACGCTACGCCAAG
TTGGTCAATGGCAATATTGCTCTGGCCTGGATCTATAACGGTGTTGCCATGGTGGTTGCA
GTGTCTGGCTTGCTGCATCCAATGGCTGCGACCGTGGCTATGCTGGCGTCTTCGCTGCTT
ATTGAATGGCGCTCGGGCAGGGCGCGCAAGTAC
>RXA00378-downstream
TAACCAGCAATTCCCAAGCCCAA
>RXA00412-upstream
CTTTTGACGAACACCACGTCGCGTACGCTTCCTCGGGGCGTTAAACTATTTGTCTTCCAG
CTTTTGTCCCCCGACTTTTGTACGAATCGAGGACACCGTC
>RXA00412
GTGTCACACACCGCGTCGACACCGACGCCAGAGGAATACTCCGCGCAGCAACCCAGCACC
CAGGGCACTCGCGTTGAGTTCCGCGGCATAACCAAAGTCTTTAGCAACAATAAATCTGCT
AAAACCACCGCGCTTGATAATGTCACTCTCACCGTAGAACCCGGTGAGGTAATCGGCATC
ATCGGTTACTCTGGCGCCGGCAAGTCCACTCTTGTCCGCCTCATCAATGGGCTTGACTCC
CCCACGAGCGGTTCGTTGCTGCTCAACGGCACCGAGATCGTCGGAATGCCGGAGTCTAAG
CTGCGTAAACTGCGCAGTAATATCGGCATGATTTTCCAGCAGTTCAACCTGTTCCAGTCG
CGTACTGCGGCTGGAAATGTGGAGTACCCGCTGGAAGTTGCCAAGATGGAGAAGGCAGCT
CGTAAAGCTCGCGTGCAAGAAATGCTCGAGTTCGTCGGCCTGGGCGACAAAGGCAAAAAC
TACCCCGAGCAGCTGTCGGGCGGCCAGAAGCAGCGCGTCGGCATTGCCCGTGCACTGGCC
ACCAATCCAACGCTTTTGCTTGGCGACGAAGCCACGTCCGCTTTGGACCCAGAAACCACG
CATGAAGTTCTGGAGCTGCTGCGCAAGGTAAAGCGCGAACTGGGCATCACCATCGTTGTG
ATCACCCACGAAATGGAAGTTGTGCGTTCCATCGCAGACAAGGTTGCTGTGATGGAATCC
GGCAAAGTTGTGGAATACGGCAGCGTCTACGAGGTGTTCTCCAATCCACAAACACAGGTT
GCTCAAAAGTTCGTGGCCACCGCGCTGCGTAACACCGGAGACCAAGTGGAATCGGAAGAT
CTGCTTAGCCATGAGGGACGTCTGTTCACCATTGATCTGACTGAAACGTGCGGCTTCTTT
GCAGCAAGCGCTGGTGCTGGCGAACAAGGTGCTTTTGTCAACATCGTTCACGGTGGCGTG
ACCACCTTGCAAGGCCAATCATTTGGCAAAATGACTGTTCGACTCAGCGGCAACACCGCT
GCGATTGAAGAGTTCTATCAAACCTTGACCAAGACCACGACCATGAAGGAGATCACCCGA
>RXA00412-downstream
TGAACGAGATGATCCTCGCAGCT
>RXA00413-upstream
CTGTACAGATCGCGGTCTATGGTGCTAATCTCCTAAATACTTGAATGACCATTTCATGAT
CCATTCACAAAAACTTTCCCAAACAAGGACGTATTTGAAA
>RXA00413
ATGAAACTTCGTCGCATCACAACCACCGCCATCGCTGGCCTCTTCGCCGCAACCGCACTT
GTTGCCTGTGGCTCCGATTCCGATGGAAGCAGCACCACTGTTGCTGAAGGCACCGAAGGC
GTGACCATGCGCATCGGCACCACCGACGCTGCGAAGGAAGCATGGACCGTATTGGAAGAC
AAGGCAGCTGAAGAGGGCATCACGCTGGACATCGTTCCTTTCTCTGACTACTCCACCCCA
AATGAGGCTCTTGCCCAGGATCAGCTGGACGTTAACCTCTTCCAGCACCTGAAGTTCCTG
GCTGAGTAGAACGTCGGCTCCGGCGCAGACCTCACCGCAGTTGGCTCCAGCGAAATCGTG
CCACTGGCACTATTCTGGAAGGACCACGACTCCATCGACGGCATTGACGGCGAGTCCGTT
GCCATCCCTAACGATCCTTCCAACCAGGGCCGCGCCATCAACGTTCTCGTTCAGGCAGGT
CTGGTCACCCTGAAGACCCCAGGTCTGGTCACCCCAGCTCCAGTCGATATCGACGAGGCA
GCTTCCAAGGTTTCCGTCATCCCAGTCGACGCAGCTCAGGCACCAACCGCTTACCAGGAG
GGTCGCCCAGCGATCATCAACAACTCCTTCCTTGACCGCGCAGGCATCGATCCAAACCTC
GCGGTCTTCGAAGATGATCCTGAGTCTGAAGAAGCAGAGCCATACATCAACGTCTTCGTC
ACCAAGGCTGAGGACAAGGACGATGCCAACATCGCCCGCCTCGTTGAGCTGTGGCACGAC
CCAGAGGTTCTGGCTGCAGTAGACCGCGACTCTGAGGGCACCTCCGTCCCAGTTGATCGT
CCAGGAGCTGACCTTCAGGAAATCCTTGATCGCCTTGAGGCTGATCAGGAAAACGCA
>RXA00413-downstream
TAATCTCTTTTGAGTTCTTTGCA
>RXA00431-upstream
TGGATCGTCCTCGCCTTCACATTCGTCGGCCTTGGCCTTGCTCTCCTCGCGATGAAGCAA
TGGCGATTCCGCGTCAGCTACTGGGTATAAGGAGCACCAC
>RXA00431
ATGGTATCGATCGATACATAGAACGCCTGCGTCGACTTGCCCATCTTCGACGCCAAATCC
GGCTCCATGAAGAAAGCCTTCCTCGGCGCAGCCGGCGGAGCAATCGGGCGCAATCAAGAC
AACGTCGTAGTCGTCGAAGCGCTGAAGAACGTCAACCTGCACTTGCGCGAAGGTGACGGG
GTCGGACTCGTCGGGGAGAACGGCGCCGGCAAATCCACCCTCCTGCGACTCCTCTCCGGC
ATCTACGAACCCACCCGCGGAAGCGCTGACATCCGTGGACGCGTCGCCCCCGTCTTCGAC
CTCGGCGTCGGCATGGATCCAGAAATCTCCGGCTACGAAAATATCATCATCGGCGGCCTG
TTCGTCGGTCAAACCCGCAAACAGATGAAAGGCAAAATGGAAGAAATCGCCGACTTCACG
GAACTCGGGGAATACCTCTGCATGCCTCTCCGAACCTACTCCACCGGCATGCGCATGCGC
GTAGCCCTCGGCGTGGTCACCTCCATCGAGCCCGAAATTCTGCTTCTTGATGAAGGCATC
GGCGCGGTCGACGCCGCGTTCATGGCCAAAGCCCGCGACCGGCTCCAAGCCCTCGTCGAA
CGATCCGGCATCCTCGTCTTCGCCTCCACTCAACGACTTTCTTGCCAACTCTGCAACACC
GCACTCTGGGTCGAC
>RXA00444-upstream
GATCGTGCCAAGGAGATCCTTGCCAGCnnnnnnnnTnnnAnTGGTTTTGGCACAAACTAA
AAAGGCTCGTCGAAGCGAGAATGATATCCTCCCAGGGTGG
>RXA00444
TTGCTGATCCCAGCCACCCTGGCCATGCTGCTGATCATTGGACCTATTTTTGCTTTGCTG
TTGCAGATCCCCTGGGATCGGTCTTGGGAGTTGGTTACCGCGCCGGAATCTTTAGGAACC
GCACGGTTATCTATCGGAACTGCTCTGTTTTCTACCGCGCTATGCGCAATTGTGGGTTTC
CCGCTAGCGTTGGCGCTGCATTTATATGAGGGTTCGCACCCCAGGGTGACATCAGTTTTG
ACGGTGCTGGTTTATGCGCCTTTGGTGTTGTCGCCGGTGGTGTCTGGTTTGGCGCTGACT
TTTCTGTGGGGCAGGCGTGGTTTTTTAGGTTCTTGGCTTGATCAGGTTGGATTGCCGATT
GCATTTACCACGACGGCTGTGGTGTTTGCCCAGGTGTTTGTAGCGTTGCCATTTTTCATT
TCCACTGTGACTACTGCACTGCGTGGGATTCCAAAACAGTTTGAGGAAATCGCAGCTACT
GAAGGCGGAACCGGCTGGGAGATCATGCACAAGATGATCATTCCGGTGGCGATGCCTGGA
ATTTTCACCGGTATGATTTTGGGATTCGCGAGGGCCTTGGGCGAGTATGGTGCGACACTG
ACTTTTGCTGGAAATATTGCAGGTGTTAGCCGCACCATTCCGTTGCATATTGAGCTTGGT
TTGAGTTCCAATGACATGGATAAAGCCTTGGGAGCGGTGATTATGCTTTTGGCTGTCTAT
GTCCTCATCATTGGAGCCATCGGAGCGTTACGATTGTTTTCCAAGGTGAGAAAGGTT
>RXA00444-downstream
TAATTGATGTGTCGTTCGCCGGA
>RXA00445-upstream
GGTGCAAAAAAGGACTAACC
>RXA00445
ATGGCGGATCTGAGCATTGAACACGTATCAAGGTTTTTCGGCGATGCCATCGCCTTGAAC
GATCTGTCATTGACCGTCCCCTCAGGCTCCATCACCGCCATCATCGGGCCGTCCGGGAGC
GGTAAAACCACGTTACTGCGTTTGGTGGCAGGCCTTGATTCACCCGATGAAGGCACCGTG
AGCATTGGGAATAAGATCGCCAAGCTGGGTGACACTGCGCTGTGTTTCCAGGATTCGCCT
TTGTATCCGCACCTTAATGTGTGGGAAAACGTGGCATTTCCGCTCAAGCTCAAAGCCACC
AATACTGCAGATGAGGTGGTGAAAAAGCGGGTGAGTGATGTTTTGGAAATGCTCGAAATT
GCTCCCCTCGCCCGCCGGAAAATTACCGAACTCTCCGGCGGGCAAAAACAGCGCGTCGGC
ATTGCTCGAGCACTGGTCAGAGACGTAGAGGTTTACCTTTTCGACGAACCGATGGCCCAC
CTCGACCAAGCCTTAGCCCGCGATATTGTGGCCGATCTGCGCAAAATTCAACAATCGTTG
GGACTGACGTTTGTATACGTCACCCACAGCAAATCCGAGGCATTCGCGCTCGCCGACCAA
ATTGTCGTGCTGGTAGATGGCCAAGTCGCGCAGGTTGGTGAGGCGGAGGACCTCGTCGAA
AAGCCAAAAACCCTAGAAATAGCCGAGTTCCTCTCCCCCACCGAGCTCAATGTGCGCCGG
CGTGGGGACGCCGTGGAGGCATGGCGACCCGAAGACACCCAGCTCGCCCGCGGTGGCACT
GCGACCGTGGAAGCCGTGACGTATTTGGGCCGCGAGTGGCTTGTACAAACCACCGAGGGG
CACGCCGTGTCGGAGGAAAAATTCGACGTCGGCGAAAGCGTCACGCTAACCCAGAAGAAG
GTGTTTAGTTTC
>RXA00445-downstream
TAGCCGCCTGCAAAAGGAGGGAG
>RXA00466-upstream
TTTAAAAGCGCACTAAGAGCTCGTCAATTCTTTAAAACAAGCTGAGAATGTGAATAATAG
GATAGGTTAACCTGATTCGATTAGAAAACGGAGATTTGTC
>RXA00466
GTGCAATCCCGCCTGTCCAAAATCCTGCGCAGTAGCGTCGTAGGCGTTGCTGTCCTAGCC
CTGTTAGCTGGGTGTTCTAACAATGCAGATGACACCGACGCTGATTCAACATCCACGGGA
AACTCCGCTTTTCCTGTTTCGATTGAACACGAGTTCGGAACCACCACAATCGATGATGTA
CCCGAAAGAGTTGTCACCCTTGGCGTTACCGACGCCGATATTGTCCTCGCATTGGGGACC
GTCCCAGTAGGCAACACCGGATACAAATTCTTCGAAAACGGATTGGGACCGTGGACTGAT
GAGTTAGTGGAAGGCAAAGAATTAACACTGCTTGACTCTGATTCCACACCAGATCTTGAA
CAAGTAGCAGCCCTGGAGCCAGACCTGATTATTGGAGTCTCTGCGGGGTTTGACGACGTT
GTATACGAGCAACTATCTGATATCGCACCGGTGGTCGCCCGTCCAGCGGGAACAGCTGCA
TACGCAGTAGCTCGCGAGGAAGCTACCAACCTTGTTGCCCGTGCGATGGGGCAATCAGAA
AAAGGACAAGAGCTCAATGAGGAAACAGATGCTCTGATCCAAGCTGCGCGTGATGAAAAT
CCTTCTTTTGACGGTAAAACAGGAACCGTCATCTTGCCATACCAGGGTAAATACGGTGCC
TACCTGCCAGGCGATGCACGGGGACAATTCCTCGATTCACTTGGCATTTCGCTGCCGGAA
GCAGTTCTTTCGCGAGACACCGGCGACAGCTTCTTTGTCGATGTCCCCGCTGAAAGCGTC
AAAGACGTAGACGGTGATGTTCTCCTCGTGCTTTCCAACGACGAAAATCTGGATATCACA
GCAGAGAATCCACTGTTTGAAACACTCAACGTTGTGCAAAAAGACGCAGTAATTGTGGCA
ACAACCGAAGAACGCGGGGGGATTACCTACAACTCAGTGCTGTCTGTTCCTTTTGCGTTG
GAACATCTCGCACCACGTATTGCTGAG
>RXA00482-upstream
GCGATTTCTATGAAATTCTTCACCCATCCACAACTATCTACTATACTTTTAGAAGTAATA
ACTATTGAGTTAATATAAACATGAAGAAAGGATTTGCTTT
>RXA00482
ATGCGCATTTCAAGCAAACTTGTCACCACAGCACTACTCGCAGCCATTTCACTTTTCGGG
ATATCCACGGCACAAGCCCAAGACATTTTTGACGGCGGACGACTTGCAGGTGGCTCGTCG
CAGGTATCTAACCTAAGTTCGGTTCCTGAAAACGTAGCGCTGCCCGAAATTGAAAATAGC
ATTGACCTAGAACGCTACAAAGGCAAGTGGTATCAAGTCGCAGCAATTCCCCAACCATTC
TCTTTACAGTGCTCACATGACGTTACCGCTGATTACGGCGTGATCGACTCGGACACAATC
TCTGTAACAAATAAGTGTGGCACTTTCTTTGGGCCTTCAGTTATTGAAGGCAGCGCTAAA
GTAGTTTCCAATGCTTCATTAAAGGTTAGCTTCCCAGGTATTCCATTTCAGAGTGAAGAC
AATCAAGCAAACTACCGCGTGACCTATATCGAAGATGATTATTCACTAGCAATCGTCGGC
AGCCCAAGCCGGTCCTCAGGATTTATACTATCCCGCACGCCACAGCTCAGTAGTGACCAA
TGGTCTCACGTTCGGAACATTACAGAGGACAGTGGGTGGTGGCCATGCGCATTCATTACA
GTCCCAGCGACAGGTGGCTTAAACACCGCCACTCCGCTCTGCACACTT
>RXA00482-downstream
TAATTAACGTAGATGGTCATCTA
>RXA00523-upstream
TGGCGCGGCGGGGGTGAATTTTTCAGACG
>RXA00523
GTGTTGCGTAATCAGTTGGCGTCGCCGGATATTATCGGCATTTCTTCTGGCGCGTCGGCG
GCGGGCGTAATTTGCATTGTGTTTTTCGGAATGTCGCAGTCTGCAGTGTCGGCGATTTCT
TTGTGTGCGTCCTTGGCTGTGGCGTTGTTGATTTATCTGGTGGCGTATCGCGGTGGTTTT
TCGGCCACGCGTCTGATTCTTACCGGCATTGGTATTGCTGCGATGCTGAATTCATTAGTG
TCGTATTCGCTGTCCAAGGCTGATTCTTGGGATCTGCCGACCGCGACGCGCTGGCTTACC
GGCTCGCTCAATGGTGCGACGTGGGATCGTGCGATGCCGCTGATTGTCACCACTGTGGTA
CTCATTCCGCTGCTGGTGGCTAATGCGCGCAATGTGGATCTTATGCGTTTGGGCAATGAT
TCCGCGGTGGGTTTGGGCGTTGCTACTAATCGCACGCGCGTCATTGCGATTATTGCCGCT
GTTGCGCTCATCGCCGTTGCTACCGCTGCATGCGGCCCGATCGCATTCGTGGCGTTTGTG
TCTGGCCCCATTGCCGCGCGCATTTTAGGCTCCGGCGGATCGCTCATCATCCCCTCCGCA
CTCATCGGCGGGTTGATCGTGCTCATCGCCGACCTAATTGGCCAATACTTCCTCGGCACC
CGCTACCCCGTCGGAGTTGTCACCGGCGCATTCGGCGCCCCATTCCTTATCTATTTACTC
ATTCGTTCCAACCGCGCGGGAGTAACCCTG
>RXA00523-downstream
TGACCACGAACCATCAACTATGC
>RXA00525-upstream
CCATCGTGTTTATTAGTCACAACCCTGAGCTTGCTGATGAATCTGATCGGGTGGTCACCA
TGGTTGACGGGCGCATCATTGGGTGTGAGGTGAkACACTC
>RXA00525
ATGAGCCTTGCAGAATCAATTCTTTTGGCGCTCACCAGCCTGAGAAGCAACAAGATGCGT
GCATTGTTGACGCTGTTAGGAGTCATCATTGGTATCGCATCAGTCATCGGAATTTTGACC
ATTCGTAAAGCCCTGCAGGATCAAACTTTGAATAGTTTGGAAAGCTTGGGCGCGAATGAT
CTGTCGGCGCAGGTGGAGGAACGCCCCGACGAAGATTCCCCCGAACCCGATATGTTCGCT
TTTTCTGGGGCTGCAAACTCTAGTGGCAATCTGATTCCGGAAGAAACAGTTGATACGCTG
GGCGATCGTTTCGCAGGCAGCATCACGGGAATCAGCGTTGGCGGAATGGGTACGCAAGGC
ACTCTCATCGGCGACAGCGCAGATCTTAAATCCGATCTCCTCGGCGTCAACGAGGATTAT
ATGTGGATGAATGGCGTCGAAATGAACTACGGCCGCGCCATCACGCAAGACGATGTTGCC
GCTCAGCGCCCCGTTGCGGTCATCGCCCCAGACACCTTTAATACGCTTTTCGACGCAAAC
CCCAACCTCGCTCTGGGGTCCGAAGTAGCTTTTGAACTCAACGGTCAAGAGACATTTTTG
CGGGTTATCGGTGTGTATAAAGAAGCCGCAGCAGGTGGACTTGTGGGAAGCAATCCAACC
>RXA00556
TACAGCCCATATACGGTGGGCAATGACATCACCCACACGAAAGATGGATTGAACACGTTA
AGTATCCGTGCAGCTCAGGGCGTAGACCAGGATTGACTTAAGGGTTCAGTGCAAACCTAC
TTCGACGCGCTGTACGCCAACAATGACTCGCACCACGTTGCCATGTTGGACTTCCGTAAA
CAGATCGAAGAGTTGAACACCATTCTCGGGGCAATGAGTTTGGGTATCTCAGCCATCGGC
GGAATTTCCTTGCTTGTCGGTGGCATCGGAGTGATGAACATTATGTTGGTGTCTGTCACC
GAGCGAAGCCGGGAAATCGGTGTCCGAAAAGCCCTCGGCGCTCGTCGACGTGACATTCGC
CTGCAATTCGTGGTTGAAGCCATGATGATTTGTTTCATCGGTGGCATCCTGGGCGTGCTT
TTGGGCGGCATTTTGGGATTGATCATGTCCAGCGCTATTGGCTACATTTCCTTGCCACCA
GTGAGTGGAATCGTGATCGCCTTGGTATTTTCCATGGCTATCGGCCTGTTTTTCGGCTAC
TACCCCGCCAACAAGGCAGCAAAGGTCGATCCAATTGACGCCTTGCGTTATGAG
>RXA00556-downstream
TAAAAGCCTCGTTTTTAAGGTAG
>RXA00596-upstream
GCGCCACCGACGGCCTCTTGAACACCGATGCATACCAACAGGCTGTGCTCGGTGAAAATG
CCATCGGAGTGCCAAGCCCTAGCTACCAGGGAGGAAACTA
>RXA00596
ATGCTTAACGCCCTGAAATTCATCCCATGGCTGATCGGCCAGATTTTCCTCTGTGGCTTC
AGCGTGATCACCGCTGCGGTAAAAAAGGACAGCGGCTTCAACCCCGTTGTTATCCGCTAC
GCACTTCGAGTGACCACGGACTTCCAGATCGCAGCCCTGTCAACGTGCATCACCGCGACT
GCTTCCACCCTGTCCCTTGGCCTACGCGAACCCCGCAAGCCCGGCGACCCCACCATTTTG
CTGATCCAAGCAGTGTTTGGTTCCGATCCAGTAGAAGTTTTTGAATCCATCGCCGATATG
GAACAACGCCTCGTCCCTTCGGTCGCTTCAATTGACCACGGCGTCCCAGGCCAAGGGGCT
TACAAGGAGATCGGCCCCAGCGATGCTGAGTGGCCAAGTCGCGAGATCGCTGACACCGCC
CAAAACACCGTCAGCCAAGACAAGAGGGAGTTT
>RXA00596-downstream
TAAAACAACATGACTGCTTTTGG
>RXA00634-upstream
AAGTGTTTTTAATTACCGCAGCTTTGTCTTAGGAGAAGTCATGGTCCAACTGGATCAACG
GGTTAGGTTCAAAAGCGCAACCTCAATAATCAGTATTGAA
>RXA00634
ATGTGGGAGCGATTCAGCTTCTACGGCATGCAAGCACTCTTGGTGTACTACGTGTATTTT
GATGTTGCAGCCGGTGGATTAGGCCTTGATCAAACCCAAGCAACAGGACTGGTCGGCGTT
TATGGCGCACTGCTCTACCTCTGCTGTTGGGCAGGCGGTTGGGTCAGTGACAGAGTCCTG
GGCGCAGAAAAAACCCTGCTGGGCGGTGCGATCTCAGTAACCATCGGACACCTTGTGCTT
GCTGGCCTCGGCGGGAAAATTGGTCTAGCCATTGGCCTTGGATGCATCGCGATCGGTTCA
GGATTTGTGAAAACAGCAGCCATGACCGTGCTGGGATGCAGGCATGGTGAACAAGAAGGA
GACGCAAAGGCAGATCCCGCATTCCAACTCTTCTACCTAGGCATCAACGTTGGTGGACTG
CTCGGACCACTCCTGACCGGTTGGCTCTCCAGCAGGTATTCCTTTGAAATGGGATTCGGC
GCAGCCGCAGTCGTTATGATCGGCGGATTGGGAATCTACGCAGCGTTGGGGAAACCAATG
CTGCAATCGTTCCCGCTCGAGGTGAAGAAAGCGCTGCTCCGCGCCCAAAACCCTGCAGAA
AAACATGTGATTAGCACGGCATTTGCTGCAGTGGCTGTGCTTTGCGGAGTGCTGCTTTAT
CTTCTCCTTACAGAAACAGTCAGCGCAGACCAACTAGCTGGAGCTCTGCTTTTAGTAACA
ATCGGTGCAGCACTATGGCTCATTATCCAGCCCTTACGACACCCACAAGTCAGCTCCGAA
GAGAAACGAAAAGTGCTGGCATTCATCCCGATCTTCGTCTGCTCAAGCGCATTCTGGGCA
GTGCAAGCACAAACCTACGGCGTACTAGCTGTGTACTCCCAAGAACGTGTTGACCGCATG
GTTGGCGATTTTGAGATCCCAGCAGCCTGGTCACAATCACTCAATCCTTTTTTCATCCTG
GCGCTGTCCATCCCGATTTCCCTGTGGTTTATGCGCGGATCACGCGCCCCAAGAGTGAAA
ATTGGAATCAGCATTGGAGTGATCATTGCGGGAAGTGGGCTTCTAGTTCTTATTCCATTT
GTTGGAATGCCGCTCGCGGCAGTGTGGGTGCTGCCTTTAAGTGTTTTCCTCATCTCACTG
GGAGAACTTTTCATCGGACCCGGAGGAATGGCTGCGACTGCGCACCACGCACCACGAATA
TTTGCCACACGATTCTCCGCCCTGTATTTCGTCACACTCGCCATCGGCATGTCTATTGCA
GGTAATGTGTCCAAATTTTACGACCCCAGCAACCACACCTCCGAGCTCCGATACTTCGCG
GTATTTGGCATTTCGATCATCGTCATCGGTGTCGGTTCACTGATGGTGGCCAAGAAGGTT
GGA
>RXA00634-downstream
TAACAGGGTTAATGTTGGGTGAT
>RXA00665-upstream
ACCAAACACTTCTGTGCGTGACACGCGCCACCTTATACTCCCACAAGCAACACAGAACAC
TCGGGATCTCAAAGTTTCGAGAAACACAGAAAGGGGAGCA
>RXA00665
ATGAGGAGCTCAACACTTCTCCTGGCTTCAGGACAAGTCACGGCATTAGCCGCTGACTAC
ACGCTCAGCCACACCCCCTCAGATGGCATCCTGGTAGTCCTTGGCTTCGCCATGATCGTC
ACCTTCATGACCCTGATCATGCTGGGTGGACTCACCCCAATGGTGGCCATGCTGTTGGTC
CCCACCATCTTCGGTCTCATCGCCGGCGCAGGACTCGGCCTTGGTGACATGGCGCTTGAC
GCCATCAAGGACATGGGGCCTACCGCGGCACTCCTGATGTTCGCGATTATGTTCTTGGGA
ATCATGATCGACGTGGGACTCTTCGACCCCCTGATCCGCGTGATCACCCGCGTTCTTCAC
GATGACCCCGCAAAGGTCGTCATCGGCACCGCAGTACTTGCAGGTGTTGTCTCCCTCGAC
GGCGACGGCTCCACCACC
>RXA00702
TTAGGGCTCCCACCTGCGGTGATGCGCAAGGGCGTAGAGGAAACCCTTGATCTTTTAGGC
ATGGCGGAGCTGCGATACGTGCCATTGGCGGAACTATCTGGTGGTGAGCAGCAGCGCGTG
GCGATTGGCGCGGTGCTGACCACTCGCCCCGCGCTGATTATCTTGGATGAACCAACCAGC
GCTTTGGACCCTAATGGTGCCGAGGATGTGCTGGCAACCGTAACCAAGCTGGCTCATGAC
TTGGCGATGACCGTAGTGCTTGCTGAACACCGCATCGAGCGCGTACTGCAGTACGTGGAC
CGCGTGGCGGATGTGGGCGCTGATGGGCACGTCACTGTTGGGACGCCGGAAGAAATCATG
GCTGATTCTGATGTGGCACCACCCATTGTGGAATTAGGACGCTGGGCTGGCTGGGCTCCC
CTACCGCTATCGATCCGCGATGCACGCGCACACTCCGCTGACATGCGCAAACGCCTGTAT
CAGCGTGGTTTAGTGGTGAACAAATTACACAACCACGCTGTCCAGCCACTTTTGATCGCC
GAAGATATCATGGTTGATTTCCCCGAAATCCGTGCCGTTGACGGCGTGAACTTGAATCTC
AACTCCGGTGAAATTACCGTGCTCATGGGCCGAAACGGCTGCGGAAAATCATCCCTGCTG
TGCGCTTTACAAGGTTCAGGGACTAGAAATCAGGGCTCGGTGCAGGTGCTTGATGAGGCC
GCGGGATTTTCGTGGACAGACCCCAAAACTTTAAAGCCCGCCAAGCGGCGCAATCTTGTG
TCCATGGTTCCGCAAACACCGACCGATATTTTGTATGAATCAACCGTGCATGCAGAGCTC
GCACGCTCTGATAAAGATGCCGCAGCACCCGCCGGCACCACGCGGGAAATCCTGGATTCA
CTGGTCCCGAATATCCCGGACCATCTCCACCCACGTGATCTATCAGAAGGCCAAAAGCTC
TCCCTCGCGCTGTCCATCCAACTCGCCGCAAAACCCCGCGTGGTATTTTTCGACGAACCC
ACCCGCGGCCTAGACTACGACGGCAAGAAATCCCTCGCCCGCTCCTTCCAACAACTCGCA
GACGACGGCCACGCCATTTTGGTGGTCACCCACGACGTGGAATTCTCTGCACTGTGCGCC
GACCGAGTGTTGTTTATGGCCTCTGGAAAGATCATCTCCGATGGCACAGCCGTAGAAATC
CTCCCCGCATCACCGGCTTACGCCCCACAAGTCGCAAAAATCACCGCCGGCATCCAAGAG
GAATCACACTGGCTCACAGTCTCGGCCGTGAAAGCTGCGCTAGGGCATGGTGAAATCTCA
>RXA00702-downstream
TGATCAACGCCATCACACTCAAG
>RXA00728-upstream
GATTACTTCACAGATGTGAGATCTTAATCAAGGGCCTGGAGCTTCAACGGCCCAACGGAA
ACCGATTGAAGCCAAGCCACTACGCCACCCTGGCCGGTGG
>RXA00728
GTGGCAGCCGCTATCATCGTGGCACTGCTCGCATGGTTTATCATCAGCGCGCTCAACAAT
GAGGCCTACGGTTGGGATACCTACCGCTCGTATCTTTTTGACACCCGCATTGCCACCGCG
GCACTTCACACCATTGCGCTGACCTTGCTGTCCATGATCTTGGGTGTGGTTCTCGGCGCA
ATCTTGGCCGTCATGCGTATGTCCGGCAACCCTGTCATGCAGGGCGTAGCGTGGCTGTAC
CTGTGGATTTTCCGCGGCACCCCAATTTATGTGCAGTTGGTGTTCTGGGGCCTGCTGGGT
TCCTTGTACCAGTCGATCAACCTCGGTTTCGCAGAGATCGATCTGCAAAGCTTGCTGTCT
AATATGTTCCTGCTCGCGGTGATCGGTCTGGGTCTCAACGAGGCTGCGTACATGGCGGAA
ATCGTGCGCTCGGGCATCCAAGCGGTGCCTGAGGGCCAGATGGAGGCGTCGAAAGCTTTG
GGTATGAACTGGTCAATGACCATGCGTCGCACCATCTTGCCGCAGGCCATGCGCATCATC
ATTCCGCCAACCGGCAATGAACTGATCTCCATGCTCAAGACCACCTCTCTGGTTGTTGCG
ATTCCTTATTCTCTCGAGCTGTACGGCCGCAGCATGGATATTGCGTACTCCCTCTTCGAG
CCAGTTCCAATGCTTCTGGTTGCTGCGAGCTGGTACTTGGTCATCACGTCTATTCTTATG
GTTGGTCAGTACTACCTGGAGAAGCACTTCGAAAAGGGCAGCACCCGCACCCTGACCGCA
CGTCAGCTCGCT
>RXA00732-upstream
TCTTTGGCAAGGTAGTGAACTTCTCTGAGCGTGAGATGGGTCAATTTGGCGCACCCGTCG
CTGATCACCGGGAAACACCAACGATGTGCAGCAGGTTCAG
>RXA00732
ATGCTGGTGCAGATGACCTCCACTTTGATGATTTGCGCCCCGATGCTGGCCATTGGTGGC
ATCATCATGGCGGTGCGTCAGGATCTTGGTTTGTGTTGGCTGATGGTGGTCAGTATTCCG
GTGCTGATCATCGTGGTGGCGCTGATCATTGTGCGCATGGTTCCGTTGTTCCAAACCATG
CAAAAGCGCATTGACCGCATCAATCAGATTATACGCGAGCAGCTCACCGGTATCCGCGTG
ATCCGCGCGTTCGTGCGTGAAGATGTGGAACGCGAACGATTCACCACTGCTAGTAAAGAT
GTCGCTGATATCGGCGTGCGCACCGGTAACCTGATGGCGTTGATGTTCCCTGCCGTGATG
CTGATCATGAACCTTTCTGCCGTTGCTGTGATTTGGTTTGGTGCTTTCCAGGTGGAATCC
GGCGAGACGCAGATCGGTACGCTCTTTGCATTCTTGCAGTACATCATGCAGATCCTCATG
GGCGTCATGATGGCAGCGTTCATGTTTGTCATGGTTCCGCGCGCTGCCGTTTCCGCTGAT
GGCATCGGTGAGGTTCTGGAAACCACACCGTCTGTGCAGGCGCCAGAAACACCGGCGCAG
CCGTCGACAAGCGCTGGCGAAATCGTGTTCAACAACGCGACTTTTGGCTACCCCGGCGCG
GATGACGCCGTGTTAAATAATGTGAGCTTCCGCGTTGCGCCTGGTAGCACGACGGCGATC
ATCGGCTCGACGGGTTCGGGTAAGACGAGGTTGATCGGGCTGGTTCCTAGGCTTTTCGAC
GTCACCGAAGGCGACGTTACCGTCGATGGCACCGATGTTCGT
>RXA00734
AGGCAGCTGCGTTATGGCAATGAAGATGCCACGGAAACGCAGCTGTGGCAGGCGCTTGCA
ATTGCTCAGGCGGCGGACTTTGTGCGTGAGATGCCAGAGGGTCTTGATTCTGAGATTGCT
CAGGGTGGAACCAATGTTTCTGGTGGTCAGCGCCAGCGACTAGCCATTGCCAGGGCGTTG
TTGAAGCAACCTGAGATCTATATTTTCGACGATTCTTTCTCCGCCCTCGATGTGAGCACA
GACGCGGCTCTTCGCCGAGCGCTGAGCACCAACCTGCCGGATGCAACCAAGTTGATTGTC
GCCCAGCGTGTCAGCACGATTCGAGATGCCGATCAGATTGTGGTGCTTGATAACGGCGAG
GTTGTCGGTATTGGAACGCACACGAATTTGCTGAACACGTGCGGTACCTAGCGTGAAATT
GTTGAATCCCAAGAGACTGCGCAGGCGCAATCA
>RXA00734-downstream
TGAGTAATACTGCAGGCCCCCGC
>RXA00759-upstream
TCACCTTGAACACTTAAAACATAACTTCATCCGGCGCTTTATTAGCTTGAAGCGCCCCGC
ACCATAATCCATTCCCCAGCAAGCAAGGACACCCACGCTC
>RXA00759
ATGCTTCGTTACGTCGGGCGACGTTTGCTCCAAATGATTCGGGTCTTTTTCGGAGCGACC
TTACTGATTTACGCCCTCGTGTTCCTCATGCCTGGTGACCCAGTCCAGGCATTGGGAGGT
GACCGCGGCCTAACCGAGGCTGCGGCCGAGAAAATCCGTCAAGAATACAATGTTGATAAA
GCGTTCATCGTTCAATACCTCGTGTACATCAAGGGCATCTTCGTGTTAGATTTTGGAACA
ACCTTCTCTGGTCAGCCAGTTATTGATGTGATGGCCAGGGCCTTCCCCGTCACCATCAAA
CTCGCCATCATGGCCCTGCTGTTTGAATGAATCCTCGGCATTATCTTTGGTGTCATCGCA
GGTATTCGCCGCGGAGGAATCTTCGACTCCACCGTGCTGGTCCTTTCTCTGATAGTCATC
GCAGTCCCCACCTTCGTCATTGGTTTCGTGCTGCAGTTCTTANTCGGCGTGAAATGGGGC
TTACTGCCCGTCACCGTAGGTTCCAACACATCAATAACGGCGCTGATCATGCCGGCTGTC
GTACTGGGTGCAGTATCGTTCGCCTACGTTCTTCGCCTCACCAGACAATCCGTGAGCGAA
AACCTCCGCGCTGATTACGTTCGAACCGCTCGAGCAAAAGGCATGTCCGGATTCAACGTG
ATGAACCGCCATGTGCTTCGAAACTCACTGATTCCCGTTGCCACCTTCCTGGGCGCCGAT
CTCGGTGCACTGATGGGTGGAGCGATTGTCACCGAAGGTATCTTCGGCATCAACGGTGTC
GGTGGAACGCTCTACCAGGCCATTTTGAAAGGTGAACCCACCACGGTTGTCTCCATTGTC
ACTGTGCTGGTCATCGTCTACATCATCGCCAACCTTCTCGTGGACTTGATCTACGCCGTT
CTCGATCCGAGGATCCGCTATGCC
>RXA00759-downstream
TAATAATGAATTCCACACAAACC
>RXA00760-upstream
ACCACGGTTGTCTCCATTGTCACTGTGCTGGTCATCGTCTACATCATCGGCAACCTTCTC
GTGGACTTGATCTACGCCGTTCTCGATCCGAGGATCCGCT
>RXA00760
ATGCCTAATAATGAATTCCACACAAACCACTCGTTGGGCCAAGATGATCAAACCCCAGAT
CAGGCTCATTTCTTCCCACAAGGACGAGGCGAGGCTCTAGTTCGACCAGGTGAAGAGCAC
TTCATCGCAGCGACTGATGAAACGGGACTTGGTGCCGTCGATGGTGTTGCTGATGACTCT
GCACCAAGCTCCATGTGGGGGGAAGCGTGGCGAGACCTTCGTCGTCGACCACTGTTCTGG
GTCTCTGCGGTGTTGATTATTTTGGCGCTTCTCCTGGCCGCAGTTCGGCAGCTGTTTACC
TCAACGGATGCGCAGTTCTGTGTGCTGGCAAACTCTCTTGATGGTCCACAGTCTGGACAT
CCCTTCGGATTCGACCGTCAAGGTTGCGATATTTTTGCTCGTACCGTCTACGGTGCTCGT
GCCTCGGTCGCCGTCGGTGTGTTGACCACGTTAGTGGTCGCCCTCATCGGTAGTGTATTT
GGTGCTTTGGCTGGCTTCTTTGGTGGCATCATGGATACCATCCTCTCCCGCATCACCGAC
ATGTTCTTCGCCATTCCACTGGTTCTGGCAGCCATCGTTGTGATGCAGATGTTCAAGGAA
CACCGCACGATCGTCACCGTGGTTTTGGTGCTTGGGCTTTTCGGCTGGACCAACATTGCG
CGTATTACCCGTGGAGCGGTGATGACCGCAAAGAATGAAGAGTATGTCACCTCCGCACGT
GCGCTTGGTGCATCAAAAGCCAAGATACTGCTGTCTCACATCATGCCAAACGCCGCAGCA
CCCATCATTGTGTATGCAACTGTGGCACTGGGAACATTCATCGTGGCAGAGGCGACGCTC
TCCTTCCTGGGCATTGGCCTTCCACCATCAATTGTCTCCTGGGGTGCTGATATCGCGAAG
GCACAAACGTCCCTTCGTACCCAACCCATGGTGCTGTTCTACCCCGCAATGGCACTTGCA
CTAACCGTTTTGAGCTTCATCATGATGGGCGATGTCGTCCGCGAGGCTCTGGATCCTAAG
TCGAGGAAGCGA
>RXA00760-downstream
TGACCACCAACATCCCACAAACC
>RXA00761-upstream
TGCTGTTCTACCCCGCAATGGCACTTGCACTAACCGTTTTGAGCTTCATCATGATGGGCG
ATGTCGTCCGCGACGCTCTGGATCCTAAGTCGAGGAAGCG
>RXA00761
ATGACCACCAACATCCCACAAACCCCCAACCACGAGGGTGAACAGCCACTGCTCGAGCTG
AAGGATCTAAAGATTTCCTTCACCTCCTCCACCGGTGTTGTCGACGCTGTCCGTGGCGCA
AACCTCACCATTTATCCTGGCCAATCTGTTGCCATCGTGGGTGAATCCGGTTCAGGTAAA
TCGACCACGGCAATGTCGATCATCGGTCTGCTTCCAGGCACCGGCAAAGTGACCGAAGGT
TCCATCATGTTTGATGGCCAAGACATCACAGGCTTGAGTAACAAGCAGATGGAAAAGTAC
CGCGGTTCAGAAATCGGACTGGTCCCCCAGGATCCGATGACCAACTTGAACCCGGTGTGG
CGCATCGGCACCCAGGTCAAGGAATCCCTCCGAGCCAACCACGTGGTTCCAGGCTCAGAG
ATGGACAAGCGCGTGGCAGAAGTTCTGGCCGAGGCAGGTCTTCCTGATGCTGAGCGTCGC
GCAAAGCAGTACCCACATGAGTTCTCTGGCGGTATGCGCCACCGCGCACTGATCGCCATT
GGTTTGGCGGCACGCCCGAAGCTCTTGATCGCCGACGAGCCCACGTCTGCG
>RXA00774-upstream
ATTATCGGCTTATAGTGTTGCCATGGGTACTGCATATAGACAGCAATTGGATGAATTCGC
ACACAATCTAATCATTTTGTGTGATCTAACTAAGGAGTGC
>RXA00774
ATGGATAAGGCGACTGATGCCCTCCTGCGCACTTCTTTGGCATCGGCAGAAAGCGCTTTA
GGCAATGCAGAAAAGCTTGAAGAGCTTCGTACTGGATGCGAGTCTCAAGCCGTCGAACTT
TTGGCGCTTGAAACTCCTGTAGCCCGTGATCTTCGCCAGGTTGTCTCCTCCATCTACATC
GTCGAGGAAATTACCCGTATGGGTGCTCTGGCAATGCACGTGGCTAATTCCGTGCGCCGC
CGTTACCCCGATCCGGTGATCCCGGAGGACATGCGTGGCTATTTCAAGGAGATGGCCCGC
CTCGCAGCTGACATGACAGATCATATTCGTCAGATCCTCATTGATCCTGAACCAGATCTT
GCCCTAGAGATGGCTAAAAGCGATGACGCGGTGGATGATCTGCATCAGCACATCATGCGT
ATTCTCACGCTGCGTCCTTGGCCTCACGACACCAAGAGCGCGGTTGATTTGACGCTGCTT
TCCCGCTTCTACGAGCGTTACGCCGATCACACGGTAAACGTGGCCGCCCGTATCATTTAC
CTGTCCACCGGGCTGCACCCGGAGGAGTACATGGAAAAGCGCGAGCAACAAAGGGCCGAT
GCCGACATGGAGAAGCGCTGGGCCGAGCTGGAGCGGCAGTTCCGCACCAGCGAG
>RXA00774-downstream
TAAAAAGGTGCTTCTCGACGCTA
>RXA00775-upstream
TCATGATCGCTGTCGTGAACATTGGCGCACGAATCATCTCCGCCAAGTTCTCTGTCAAGC
AATAATAATCTCAGAAAATACAACAGGAGTATCTAAAGCG
>RXA00775
ATGTCGAAGCTCAAGCTCAATGATGTCAACATCTACTAGGGTGATTTCCACGCAGTGCAG
AACGTGAACCTCGAGGTTCGTGCAGGCTCTGTCACCGCATTCATGGGACCATCCGGCTGT
GGCAAGTCCACAGTTCTCCGCTCCATGAATCGTATGCACGAGGTCACCCCAGGTGCATAC
GTCAAGGGCGAGATCCTTCTCGACGGCGAGAACATCTACGGCTCCAAGATCGACCCAGTT
GCAGTCCGTAACACCATCGGCATGGTGTTCCAGAAGGCTAACCCATTCCCAACCATGTCC
ATCGAGGACAACGTGGTTGCAGGTCTGAAGCTTTCCGGGGAGAAGAACAAGAAGAAGCTC
AAGGAAGTTGCTGAGAAGTCTCTTCGTGGCGCAAACCTGTGGGAAGAGGTTAAGGATCGT
CTGGACAAGCCAGGCGGCGGCCTCTGCGGTGGTCAGCAGGAGCGTCTGTGCATCGCTCGC
GCGATCGCGGTTGAGCCAGAAATCCTCCTCATGGACGAGCCTTGCTCCGCGCTTGACCCA
ATCTCAACCCTGGCTGTGGAGGACCTTATCCACGAGCTGAAGGAAGAGTTCACCATCGTC
ATCGTGACCCACAACATGCAGCAGGCTGCACGTGTGTCCGATCAGACCGCGTTCTACTGC
CTGGAGGCGACCGGTAGGCCAGGTCGTCTGGTTGAAATCGGACCTACCAAGAAGATCTTC
GAAAACCCAGATCAGAAGGAAACCGAAGATTACATCTCCGGCCGCTTCGGA
>RXA00775-downstream
TAAATCGAAGAATTAAAGCCACT
>RXA00776-upstream
CGTACATCTCCGCCGGCCTCGTGCTGTTCGCCCTTACCTTCATCGTCAACGCTGGCGCTC
GCGCCATGGTTAACCGCGGAAAGTAGAAGGGGACAAAATC
>RXA00776
ATGACTAACAATGTTGTTACTCCGCGCATGGATGAGCCTTTAAAGAAGAGCTCAGCCTTC
ACCGACATCTCCTCCAGCCGTAAGACCACCAACACCGCAGCAACCGTCATCATTTATGGT
GCGATGCTCATCGCAGCTGTGCCACTGGTTTGGGTGCTGTGGACCGTGATCTCTCGAGGC
ATCGCTCCGATCCTCACTGCTGATTGGTGGTCCACCTCCCAGGCTGGCGTCATGCTGATG
CTGCCAGGCGGCGGTGCAGCTCACGCCATGATCGGTACCTTCATGCAGGCGGTAGTCACC
TCGGTGATTTCCATTCCAATCGGTATCTTCACCGCAATCTACTTGGTGGAATACTCCAAC
GGTAACCGTCTCGGACGCTTGACCACCTTCATGGTTGACATCCTCACCGGTGTTCCTTCC
ATCGTTGCGGCACTGTTCGTGTACTCCTTGTGGATCGTGCTCTTCGGCTTCGACCGCTCC
GGCTTCGCAGTGTCCCTGTCACTGGTGATTTTGATGGTTCCAGTGATCATCCGAAACACC
GAAGAAATCCTCCGCGTTGTTCCTCAGGATCTGCGTGAAGCGTCCTACGCACTGGGCGTG
CCAAAGTGGAAGACCATCGCAAAGATCGTTCTCCCAACCGCACTGTCCGGTATCGTCACC
GGCGTCATGCTCGCAGTCGCTCGTGTCATGGGTGAGTCGGCACCAGTTCTGGTCTTGGTT
GGTTCCTCCCAGGCCATCAACTGGAACCCATTCGGCGGTCCGCAGGCTTCCCTTCGACTG
ATGATGCTTGATATGTACAAGGCCGGCACCGCACCAGCAACGCTGGACAAGCTGTGGGGC
GCAGCCCTCACCGTGGTGCTCATCATCGCTGTCCTGAACATTGGCGCACGAATCATCTCC
GCCAAGTTCTCTGTCAAGCAA
>RXA00776-downstream
TAATAATCTCAGAAAATACAACA
>RXA00777-upstream
TTAAGTGAATCGGGCGCCCTCTCCCAGCAATTGAGGGTAGGGCGCCCGATTTTACTAACA
AGCTTTTTATCAATACGCCAGTTAAGGAAATAAACCACCA
>RXA00777
ATGGCCACTAATGAGTCAGTCTCGGAGAAGCAACGCCTGGATGCAACCAGGGTGCAGGCA
CATCCTGTAGCAGTTAATGCGAACTCCTCTCAGACCAAGCCTTCAAAGAAGATTGTCGCC
GAAGGTGGCGGAAGCGTTAAGCGTCCCGGCGATCGCATCTTCGAAGTCCTATCCACCGCT
TCTGCAGCAATCATTACTGCGATAATGATTGCCATTGCGGCGTTCCTTATCTGGCGTGCT
GTTCCCGCCTTGATGCGAAATGCTGAAGGTATTGGCGGATTCTTCACTTATTCAGGCGCT
TGGAACACCACCGACATTGATGCAATGTACTTCGGTATTCCAAACCTGCTAGCTGCAACA
CTTCTCATCTCTGTCATGGCACTGATCATCGCCATGCCGATTGCTCTTGGTATTGCGATC
TTCTTGTCCAACTACTCACCAAAGCGCCTGGTTAAGCCACTTGGCTACATGGTGGACATC
CTGGCTGCTGTGCCTTCCATCGTCTACGGCCTTTGGGGCTGGCAGGTGCTCGGACCAGCT
CTGTCCGGTTTCTACACCTGGATTGAAAGCTGGGGCGGAAGCTTCTTCCTCTTCGCTACT
TACCAAAACTCACCTTCTTTTGCTACCGGCCGTAACATGCTCACCGGTGGCATGGTGCTC
GCAGTGATGATCCTTCCTGTTATCGAAGCAACCGCACGTGAAGTTTTCATAGAGACTCCA
AAGGGCCACATTGAATCTGCTCTTGCACTTGGCGCAACCGGCTGGGAAGTCGTTCGTTTG
ACGGTTCTCCCATTCGGAATGTCCGGCTACGTTTCCGGCGCGATGCTCGGCCTCGGCCGC
GCACTGGGTGAGACCATGGCGCTATACATGGTTGTTTCTCCATCCTCGGCGTTCCGCTTC
TCGCTTTTCGATGGCGGTACCACCTTCGCAACGGCCATCGCCAATGCCGCTCCAGAATTC
AACGACAACACCCGCGCAGGCGCGTAGATCTCCGCCGGCCTCGTGCTGTTCGCCCTTACC
TTCATCGTCAACGCTGGCGCTCGCGCCATGGTTAACCGCGGAAAG
>RXA00777-downstream
TAGAAGGGGACAAAATCATGACT
>RXA00828
GAGCACCAATTTGTGGCGCGCACTGTGCGTGATGAGCTAGAAATTGGTCCGAAAATCATG
AAAGTTGATGCAAGCGAGCGCATCGAGGAGTTGCTTGATCGGTTGCGCCTCCGCCACTTA
GAAAATGCTAATCCGTTTACCTTGAGTGGTGGAGAAAAGCGCCGCCTATCTGTGGCGACA
GCCTTGGTGGCAGCACCGAAACTTCTCATTTTGGATGAGCCTACGTTTGGCCAAGATCCC
GAGACCTTGACAGAGCTGGTGACGATGTTGCGTGAATTAACAGACAACGGAATCAGCATT
GTGTCAGTAACCCATGATCGTGATTTCATCGCAGCGCTGGGCGATCACCACATTGAGGTG
AGCGCGAAG
>RXA00828-downstream
TGAACCTGCTGATCAAAATTAAT
>RXA00832
ACACTGACAGCAGTGGTGTACGGGTTCTTCCTGTTTCGCCAAATGGGTGCGCAAGCTGGT
GAATTTCAAGAGGTCGAGGTCGCAGAAAAGGCAGACGACGCAGCAAAATGGGAGGTCCCA
TTTAGAGGCTTAATCTTGATTATCACTGTGCTCCCCATCGTGTTGCTGTCCCATGACATG
GCCACGGTGATGGATGAAGTCCTGGCAAGCCTTGGTGCACCCGTAGCAATGGCTGGATTA
ATTATTGCCACCATTGTCTTCTTGCCAGAGACCATCACCTCCTTGAAAGCTGCGTGGACA
GGAGAGATTCAGCGAGTAAGCAACCTGGCGCATGGAGCCGAAGTATCAACGGTGGGGCTG
ACAATCCCAGCTGTTCTAGTGATCGGCGTGATCACAGGTCAAGATGTAGTTTTGGGGGAG
ACCCCGATCAACTTGTTGCTGCTGGGAACCACCATTGCGGTGACAGCCATTGCGTTTAGC
TCCAAGAAAGTCAGTGCTGTGCATGGCTCGGTGCTGCTCATGCTTTTCGGTGTTTACATG
ATGAGCATGTTCGCC
>RXA00832-downstream
TGATTTAGGTAGCCTGGTGGGAA
>RXA00934
CCAAGTTTTTCCATGGCGGCGCTAGCGTTTGCGGAAGGCCCCATCGTTGCTACTTACCAC
GCCTCCAGTAGCGGATCGAAGCTGGTCAAGGCTTTCTTACCAGTGCTTTCGCCCATGCTG
GAGAAAGTGCGCGCAGGCATCGCCGTGTCTGAAATGGCTCGGCGCTGGCAGGTGGAGCAA
GTCGGCGGCGATCCCGTGCTGATCCGCAACGGGGTAGAGACCTCCATGTTCAAAGCCGCG
GGCCAAATCGAACCGAATGATCCTGTAGAGATCGTCTTTTTGGGTCGCCTCGATGAGTCC
CGCAAAGGCCTCGACATCCTCCTGCGCGCTCTGACCAGGCTGGATCGCCCGTTTACCTGC
ACCGTCATTGGCGGCGGCACCCCGCGAGAAGTCGCCGGCATCAACTTTGTGGGCCGCGTC
AGCGATGAGGAAAAGGCAGCAATCTTAGGTGGCGCAGACATCTATGTCGCACCCAACACC
GGCGGCGAAAGCTTCGGCATCGTGCTAGTTGAAGCGATGGCCGCGGGATGCGCTGTCGTC
GCCAGCGACCTAGAAGCGTTCTCCCTGGTCACCGATTCTGAAGCCGCACAGCCAGCGGGC
GTGCTATTTAAAACCGGCTCAGACGCCGACCTAGCCAAAAAACTTCAAGCGCTTATCGAC
GACCCCTCCTCCCGTTCCACGCTTATCGCCGCGGGGCTAAAGCGCGCAAACGCCTACGAC
TGGTCGACAGTATCCACCCAGGTCATGGCAGTCTATGAAACCATTGCGATCGACAAAGTG
AGGCTTGGA
>RXA00934-downstream
TGACCCTTGTTTACCTCCTCATC
>RXA00939
GGTGTCCTGCTCGGTGGAGTGACCATGTCGATTGGCATGCTCGTGCACGAGGCCTCCGTC
CTGGTGGTCATCGCGATTGCGATGCTCCTGCTGCGCCCGACCCTGAAGGAAGACAAGGAC
AAGGCAGACGTCAGTACTGCTGACGGCGCGAAGGAGAGGCTGAGCGCC
>RXA00939-downstream
TAACGACACAATCGCCACAGCCA
>RXA00942-upstream
CATTGACCGGCAGCTGGTCTGATTGACTGCACATCGTACATTGGACGGTGGACACGTTTC
AGAGTCCGCTGGATTTCATCACATCGGAAGGAAGAGAATT
>RXA00942
TTGAGTACCAAAAATTACCACGTCGAGGGTTTGACCTGCGCAAACGGTGTAGCTTCCGTA
GAGGATGAAATCGGCATTGTTGCGGGCACCCAGGGTGTGGATATTGATATTGAGACCGGC
CGCGTCACGGTGACTGGTGAAGGTTTCACTGACGAGGAAATCATTGAGGCTGTCGCGAAC
GCGGGCTACAAAGTTTCTGGGCGG
>RXA00942-downstream
TAGCACAATTACACATTCATCTC
>RXA00950-upstream
TCTCCGTACGCCCCACGAAGACACCTCGAAGTTCCCACGCGAAATGTTTCACGTGAAACA
TCTGCTGATTTTTGTCTCCAAGTGGAGTTGAATGAGAGTT
>RXA00950
ATGAACACTCCGGCAGTTCAGGTTCAAAATCTAAGTTTGAGTTTTGGGTCGTTCACAGCT
GTCAACGGCCTGAGCCTCACGGTGGAGCAGGGGAGCATTCACGGCTTCCTCGGCCCCAAC
GGTGCAGGAAAGTCAACAACCATCAGGGCACTCATTGGAGTGCTAAAACCCCAAACAGGT
TCAGTCGCTATTCTCGGCCAAGATCCTGTTGCTCACCCCGATGTCCTTCGAAGAGTTGGC
TACGTTCCAGGAGATGCCACACTGTGGGACAACCTCACTGGGGCGGAAGTTTTCAGGGCG
CTCGAATCACTCCGCAAGACTCCATCCAACCGAGCTCTAGAAAACGAGCTCATTGACGCC
TTCCAATTGGATCCCTCGAAGAAGATCCGCGAATACTCGACAGGTAACAGAAGGAAAGTC
AGTCTCATCGCGGCGCTCAGTCATGAGCCCGAGCTCCTCATCGTTGACGAGCCCACCGCA
GGCTTGGATCCCATCATGGAGCAAGTCTTTGTCACCTATGTCCGCAAGGCACGAACCAAC
GGCGCGTCCGTGTTACTCAGCAGCCACATTCTCAGTGAGGTGGAGCAGCTGTGTGATTAC
GTCACGGTCCTTAAAGAGGGGCGAGCAGTTGCATCTAATGAGGTGAGCTATCTGAGGAAG
ATCTCCGCTCACCGCATTACTGCCACGATTCCGGCGGTACCTCAACACCTTGCTGGCAGG
GGAGAAGTGGATTTCGATGCTGGCCATCTCAGCATCACCTGCGATGCCTCCGAGGTTCCC
GATATTTTGCGCATCATCATCGACGCTGGCGGCCAGGACATCATCAGCACCGCGGCGTCG
CTGGAGGAGATCTTCTTGCGTCACTATGGAGAAACGGTGAGTGGTTCAGAAAGCAAGGCA
TCACAA
>RXA00950-downstream
TGATCCGTCTTAATCTACGTCTT
>RXA00960
CTGAAAAACGATGTTGATGTCAACGTCGCAGGCTTTGTTGTCCCACTGTGCGCCACCATC
CACCTAGCTGGATCGATGATGAAGATCGGCCTCTTCACCTTCGCTGTTGTCTTCATGTAC
GACATGGAAGTAGGCGTCGGCCTCTCCATCGGATTCCTCCTCATGCTGGGCATCACCATG
ATCGCCGCACCAGGCGTTCCCGGCGGAGCCATCATGGCAGCAACCGGCATGCTGGCCTCC
ATGCTCGGATTCAACACCGAACAAGTCGCCCTCATGATCGCCGCTTACATCGCGATTGAC
TCCTTCGGCACCGCAGCAAACGTCACCGGCGACGGCGCAATCGCAGTCATCGTGAACAAA
TTCGCCAAGGGCCAGCTGCACACCACTTCCCCAGATGAAATCGAAGAAGACGACCGCGTT
GCCTTCGACATCACTCCATCGGATGTGGAACATCACAAG
>RXA00960-downstream
TAGAAACCCGCATTTTCTGTAGT
>RXA00980-upstream
GTTGATGGACAGGCAGGTTGCTGTTGGATCTGCTGAGTTACTTGATCATGAACCAGACTC
GACCAGGATGCTGGAGCTAAATGCCGAAGGAAAGACGGCG
>RXA00980
ATGTTTGTCGGAGTGAACGGACACGCCATTGGAATCGTGGCCGTCGCCGACGCCGTTCGT
TCAGATTCTGCCTCAGCAATCGAATCGGTGCATAAGGCGGGCATTCAAGTTGTCATGGCG
ACTGGCGACGCTCACCGCGTTGCACAAAACGTGGCCTCCAAGCTGGGAGTGGATGAAGTC
TACTCAGAGCTACTCCCTGAACAGAAATTAGAACTGGTGCGTGATCTGCAAGCTGGCGGC
AAAACGGTCGCGATGGTGGGTGACGGAGTCAACGACACCCCAGCATTGGCAGCTGCTGAT
ATCGGAGTAGCGATGGGGGTGGCAGGTTCCCCTGCAGCGATTGAAACCGCTGATATCGCA
CTCATGGCGGATCGTCTCCGACGGCTGGCACATGCAGTGACCTTGGCAAAACGCACCGTA
AGAACCATGCGCATCAATATTCTGATTGCGTTGGCTACCGTGATGGTGTTACTAGCTGGC
GTCCTATTTGGCGGAGTTACCATGTCGGTTGGCATGCTCGTTCACGAAGCAAGCGTGCTG
CTTGTTATCAGCATCGCCATGCTGTTGCTGCGTCCAACACTTAAAGAAGATGCTGCGGAA
GCAAGTGATATTAAACGCTCGGAAATACAACAGATCGCA
>RXA00980-downstream
TAACCAATGGCTGGGTACTGATG
>RXA01000
ATGTTGGCTGCCCGCGGGGTGGGACCTTATTGGCTGCGTACCGTTTTACGGTTCGTGTTC
GCGGTGATTCGTGCGTTCCCCGAAGTGGTTATCGCAATTATTTTGCTAACTGTCACCGGC
CTAACTCCTTTTACTGGTGCGCTCGCATTGGGTATCTCCGGTATTGGACAACAGGCAAAG
TGGACCTATGAAGCCATTGAGTCCACTCCCACCGGCCCGTCAGAGGCAGTGCGTGCAGCG
GGTGGAACTACGCCGGAGGTTCTGCGGTGGGCGTTGTGGCCACAGGTTGCGCCATCCATT
GCATCTTTTGCCCTGTACCGCTTTGAGATCAACATCCGTACCTCTGCGGTATTGGGGATC
GTTGGTGCAGGTGGTATCGGTAGTATGCTTGCCAATTACACCAACTACAGGCAGTGGGAC
ACCGTGGGCATGCTGCTCATCGTCGTGGTTGTCGCAACGATGATCGTCGATCTCATCTCC
GGCACCATCCGCCGCCGCATCATGAAGGGGGCTAGTGACCGTGTCGTGGCACCAAGCAAC
>RXA01000-downstream
TGACGCTCCACCAAGCATCCGCA
>RXA01002
CCCACGGAGCACGACAAGCAGATTGCTTTTCACGCGTTGGAGTCCGTGGGCATTTTGGAC
AAAGTGTGGACCCGAGCTGGTGCTTTGTCGGGTGGACAGAAACAGCGCGTTGCTATTGCG
CGCGCCTTATCGCAAGATCCGTCTGTCATGCTGGCAGATGAGCCTGTGGCAAGCCTTGAT
CCGCGAACCGCGCATTCCGTGATGCGCGATCTAGAAAACATCAACAACGTGGAAGGCCTC
ACCGTGTTGGTGAACTTGCACTTGATTGATTTGGCTCGTCAATACACCACAAGGCTTGTG
GGTTTGCGTGCCGGCAAGCTGGTCTATGACGGTCCTATCTCTGAGGCCACCGATAAAGAC
TTTGAAGCTATCTATGGTCGCCCCATCCAGGCTAAAGACCTGCTAGGTGATCGCGCA
>RXA01002-downstream
TGACCACGCCTTCTTCTACACTT
>RXA01003-upstream
AGCTGGTCTATGACGGTCCTATCTCTGAGGCCACCGATAAAGACTTTGAAGCTATCTATG
GTCGCCCCATCCAGGCTAAAGACCTGCTAGGTGATCGCGC
>RXA01003
ATGACCACGCCTTCTTCTACACTTATCCCACAAAAGCCTCGGGCTGGGGTAAAGACCTAT
CTCATCATCGGCGCCATCGTTGTCTTCACCGTGGCAACAGCAACCCCAGCGCTAGGTGGC
ATTGAGCTTGATTTCGCTTCCATTGCTGCGAATTGGCGCAATGGTGCCAACAAACTCCTG
CAAATGCTGCAGCCCAACTTTGCGTTCTTGCCTCGTACGTGGCTTCCCATGTTGGAAACC
CTGCAGATGGCGCTTGTTGGAGCTGTCTTGTCTGCTGCCGTATCGGTGCCTTTGACGTTG
TGGGCAGCGCAGGCAACCAACACCAGTGCGATTGGTCGTGGCATTGTCCGCACCATCATT
AACGTGGTGCGCTCTGTCCCCGACTTGGTGTATGCCACCATCTTGGTCGCCATGGTTGGT
GTCGGCGCATTACCTGGCATTTTGACGCTGTTTCTGTTCAACCTGGGCATCGTGGTCAAG
CTTGTCTCTGAGGCCATTGATTCCACTGAGCATCCCTATATGGAAGCAGGACGCGCAGCA
GGTGGATGACAGTTCCAAATCAACCGAGTGTCCGCGCTTCCTGAAGTCATGCCGCTCTTT
GCCAACGAATGGCTCTACACCCTAGAGCTGAATGTACGCATCTCCGCCATCCTTGGCATC
GTGGGCGCAGGTGGCATCGGCAGGCTGCTTGATGAACGCCGAGCTTTCTATGCCTACGCG
GATGTTTCCGTGATCATTCTGGAAATCCTCATCGTGGTGATTGTCATTGAAGTAATCTCC
AACGCACTTCGAAAGAGGCTGGTA
>RXA01003-downstream
TGAGCACCTTAACCTCTCACCGC
>RXA01006-upstream
GCCTTACGTGAAGGGCTTTAGCCCCGAAGTGATCGGCCGCCCCAGCTTCTATGAGACCTA
CATTGACCATTCCAGCGACCATTCCAGTGAGGAGGACTAA
>RXA01006
ATGACTACCTCGCAGATTCTGCGCCGCATCGGCCAAGCCGTCTTGGTCTTGTTGGTCACC
TTTACCTTGGCGTTCATCATGCTTTCCGCCCTCCCTGGCGATGCTGTGTCCGCCCGCTAT
TCCAGCCCTGATTTGGGTCTGTCACCTGAGCAGATCGCACAGATCCGTGAATCCTATGGT
GGCGATGAATCCCTGATCGCTCAGTACTTCTCCACCTTGGGTGGCTTCCTTGTAGGTAAC
TTCGGTTACTCCGTACAAACCGGAACTGCCGTGGCAACCCAGCTGGCAGAAGCCCTACCA
GGCACCTTGACCTTGGCTATTTTGGCATTCTTGCTCGCAGCCATTTTGGCACTGGTTATT
TCCATTCTTGCCACCATGGATCGCTTTGCATGGATCAAGGCCATCTTCCAGGCTCTGCCT
CCATTCTTTGTGTCCCTTCCAAGTTTCTGGTTGGGCATCATCTTGATCCAGATCGTGTCC
TTCCGCCTTGGTTGGGTCCCCGTTATTGGGACCACCCCGGCACAAGGACTGATCCTGCCG
ACCATCACCTTGTCCATCCCAATTACCGCTCCGCTTGCACAGGTGCTCATCCGCTCGATT
GAAGAGGTCAAGGCACAACCGTTCATCGCGGCTGTTCGTGCTCGCGGTGCGGGTGAAATG
TGGATCTTCTTCCGCAACATCATTCGCAACGCCCTTTTGCCAACCCTGACGATTGCCGGC
ATCTTGTTTGGTGAACTAGTCGGTGGGGCCGTGGTCACCGAGGCAGTGTTCGGCCGCGCT
GGACTTGGCCAAATGACCGTCAACGCAGTGGCCAAGCGCGATATGCCAGTGATGCTTGCC
ATCGTGGTGATCGCAGCT
>RXA01012-upstream
GACCTCATGGTGGCTGACTGTGCTGCCTGGTTTTGTCATCATCGCCGTGGTTATGTCTGC
CAACTACCTAAGCCGCATCATTCAGAAGGAGGCATAGAAA
>RXA01012
ATGACTACTCCCTTGTTAGAGATCAACGATCTGGTTGTCTCCTATCAAACTGCTAAAGGT
TTGGTGCATGCTGTCAACAATGTCAGCCTGGAGGTGCACCCTGGCCAAATCACCGCGATT
GTTGGTGAGTCCGGTTCTGGTAAGTCCACCACCGCTCAGGCCGTGATTGGTTTGCTGGCT
GATAATGCTGAAGTGGATTCTGGTCGGATTTCTTTCAACGGCCGTTCCCTTGTTGGCTTG
AACGCACGTGAGTGGAAAAACGTTCGCGGTACCAAAATTGGTTTGATTCCGCAGGACCCC
AACAACTCTCTGAACCCGGTGAAAAGTATCGGCGCTTCAGTGGGGGAGGGCTTGGCTATC
CACAAGCGTGGAACGGCCGCCGAGCGCAAAAAGAAGGTCATTGAGCTTCTAGAGCGCGTG
GGTATTGATAACCCAGAGGTCCGCTATGAGCAGTACCCGCATGAGCTGTCTGGTGGCATG
AAGCAGCGCGCGTTGATTGCCGCTGCCATTGCACTTGAACCAGAGCTGATCATTGCCGAT
GAGCCCACATGTGCGCTGGATGTGACCGTGCAGAAAATTATTCTCGATCTGCTGGAAGAC
ATGCAGCGTGAATTGGGGATGGGTATTTTGTTCATTACTCACGATCTAGCCGTGGCAGGC
GATCGGGCGGATCGCATCGTCGTCATGCAAAAAGGCGAGGTGCGCGAAAGTGGTTACGCG
GCTTCGGTCTTGACCGACCCCCAGCATGAGTATTCCAAGAAGTTGCTTGCCGACGCGCCC
TCCCTCACCATCGGCGAGATCCCCACGCGAGTTCCGGCCGTAGATCCGGAGGTAGCGCAG
GCCAAAGGCCCGCTTCTGGTAGTGGATAAATTCCGCAAGGAACACCAACGAGGCAAAGAA
GGAGCATTTGTTGCCGCAAATGATATTTCCTTCGAAGTACTGCCTGGCACCACGCATGCC
ATCGTCGGTGAATCCGGTTCTGGTAAAACCACGCTTGGCCGCGCGATCGCGATGTTTAAT
ACGCCGACCTCTGGTTCCATTTCAGTAAGTGGCAAGGACATCACCAACCTGTCCAAGGCC
CAGCAGCGGGAACTGCGCCAGCAAATCCAGCTGGTGTACCAAAACCCGTATTCTTCCCTG
GATCCTCGCCAAACCATTGGCTCCACCATCGCGGAACCTCTGCGCAATTTCACCAAGGTG
AGCAAGCAGGAAGCCGACGAAAAGGTGGCACACTACCTGGAACTGGTGGCGCTTGACCCG
GCTCTTGCCACCCGTCGCCCACGTGAGCTCTCTGGTGGTCAGCGCCAGCGCGTCGCCATT
GCTCGTGCCATGATTTTGGAACCTGAATTGGTGGTTTTCGACGAAGCCGTATCCGCGTTG
GATGTGACTGTGCAGGCACAAATCCTGCGCCTGCTCGACGATCTGCAACGAGAGCTAGGC
TTGACTTACGTGTTTATTTCCCACGACCTGGCTGTGGTCCGTGAAATCTCTGACACTGTG
TCTGTGATGAGTCGCGGCAACCAGGTGGAACTTGGAAAAACCGGAGAAGTATTTAACAAC
CCGCAAAGCGATTTCACTCGCCGACTCATCGACGCGATCCCAGGATCGCGCTATCGTGGT
GGCGAACTCAATCTTGGACTA
>RXA01012-downstream
TAGGAGCAGATCTTAAAAATGTC
>RXA01013
TTGGGCAATCCTTGGACGAGGCCTGCTGCTGTTATTTCCATCGTGGTACTCGCCGTTGCG
GTGCTGATGGCACTTGTTCCTGGACTGTTTACCTGCCAGGATCCGTTCACTGGCGATGAT
GTGGCGCTGCTTGGGCCAAGTGGCACCCACTGGTTTGGTACCGATTCCGTGGGACGCGAT
CTCTACAGTCGTGTTGTTTACGGCGCGAGGGAAACCCTGCTCGGTGCACTGATCGCAGTG
CTGGTTGGTCTGATCGTGGGAACCCTGATCGGACTGCTCGCAGGTGCACAGCGCGGTTGG
GTTGACACTGTATTAATGCGTTTCGTGGATGTGCTGTTGTCCATCCCGGGACTGCTGCTC
AGCTTGACTGTCATTATCCTTTTGGGATTCGGCACCATGAACGCAGCGATCGCAGTCGGT
ATTACCTCTGTTGCCACCTTCGCGCGTCTGGCGCGTTCCCAGGTGATGACTGTTGCAGGT
TCGGATTTCGTGGAAGCTGCATACGGTTCCGGTGGCACCCAGGCGCAGGTGTTGTTCCGC
CACATTCTGCCTAACTCTCTGACCCCAGTGTTTGCTCTTGCAGCACTGCAGTTCGGTTCC
GCGATTTTGCAGCTGTCCGTGTTGGGCTTCTTGGGCTACGGCGCTCCGGCACCAACAGCA
GAGTGGGGTCTGCTGATCTCTGATGCCCGCGACTACATGGCGACCTCATGGTGGCTGACT
GTGCTGCGTGGTTTTGTCATCATCGCGGTGGTTATGTCTGCCAACTACCTAAGCCGCATC
ATTCAGAAGGAGGCA
>RXA01013-downstream
TAGAAAATGACTACTCCCTTGTT
>RXA01070-upstream
CAGCTTCGGTTAATTTGGTCACACTAATGCAATAAATTCCTGTCTACAGCGTTACAGTTA
ATGAATTCAATTCAACCGCTAAACGCAAGGAGTGCTACCC
>RXA01070
ATGGCTAACGCCACCGCACAGAAGGGCCGTTTCGGCCTTCCCGGCTGGATGACTGGCTTT
GGTGCCCAGGTTATCGCCGGCCTCATTCTTGGTCTTATTCTCGGCCTTGTCGCCGGAGGC
ATGGACAGCGGCGCTGCAGACGGTGAAGCAAGCTGGCTTACCGGTCTTCTTAGCGGCGTC
GGTTGTGCTTATGTTTCTCTACTTAAAGTTATGGTTCCACCACTGGTGTTCGCTGCAGTG
GTTACCAGTGTGGCAAAGTTGCGCGAGGTAGCTAACGCTGCTCGCCTGGGTGTTTCCACC
TTGGTGTGGTTCGCCATTACTGCATTCTTCTCTGTGCTCGCGGGTATCGCCGTAGCGCTG
ATTATGCAGCCTGGTGTTGGATCCACTGTCGACGCATCTAATGCTGCTGATCCTTCTCGC
GTGGGCAGCTGGCTGGGCTTTATCCAGTCCGTTATTCCATCAAACATTCTGGGACTTTCC
GGTTCTTACAGTGAGAACTCTGGTGTGAACCTGTCCTTCAACGTGCTGCAGATCCTGGTT
ATCTCCATTGCGATTGGTGTTGCAGCTCTGAAGGCTGGCAAGTCCGCCGAGCCTTTCTTG
AAGTTCACCGAGTCCTTCCTCAAGATCATCCAGATCGTGTTGTGGTGGATTATTCGCCTG
GCTCCAATTGGTTCCGCTGCGCTGATCGGTAATGCTGTTGGTACCTACGGTTGGTCTGCA
CTTGGATCCCTGGGCAAGTTTGTTCTTGCGATCTACGTTGGTCTGGCAATCGTCATGTTC
GTTATCTACCCAGTGGTGCTGAAGCTCAATGGAATTCCTGTTCTTGGATTCTTGAAGCGC
GTTTGGCCTGTCAGAAGCCTTGGCTTTGTTACCCGTTCCTCCATGGGCGTTATGCCAGTT
ACCCAGCGCGTTACTGAGCAGTCCTTGGGTGTTCCATCTGCGTACGCTTCCTTTGCTATC
CCACTGGGTGCGACCAGCAAGATGGACGGCTGCGCTGCTGTCTACCCAGCTGTTGCCGCT
ATCTTCGTGGCACAGTTCTACGGCATTGACTTGAGCATCATGGATTACGTACTGATCATG
ATCGTCTCTGTCCTGGGCTCTGCTGCAACTGCAGGCACCACTGGCGCAACCGTCATGCTG
ACCCTGAGCCTATCCACCTTGGGTGTGCCACTTGCTGGTGTTGGTCTGCTGCTGGCTATC
GAGCCAATCATCGACATGGGACGTACCGCAACCAACGTCACCGGTCAGGCACTGGTTCCT
GCGATCGTTGCTAAGCGCGAGGGCATTCTGGATCAGGATGTGTGGGATGCTGCTGAAAAG
GGTGGCGCTGCTATTGAAATGGCAACCGTCTCTGAGAAAGAAACTGAGCCTGCAGAGGTT
CGCTCC
>RXA01070-downstream
TAAGCTCTCTTGAGTACCTGAGA
>RXA01094-upstream
GTCAGCTGACCGGGGTAGCGGGCGGTGGGCGGACAAGTCTTGCTAGATTGAAGTGCATTA
CTTGTGGCCTGACTGTTAGGTTTACGTTGTTGTGGATGTC
>RXA01094
ATGACTTTGGCGACGATTCCCTCACCACCGCAGGGTGTGTGGTACTTGGGTCCCATTCCG
ATTAGGGCCTATGCGATGTGCATGATCGCTGGCATTATTGTTGCCATTTGGCTGACGAGA
AAGCGCTACGCCGCCCGCGGTGGAAACGCTGAAATCGTCGTTGATGCAGCGATCGTGGCA
GTTCCTGCCGGAATCATCGGTGGACGCATTTATCACGTCATTACCGACAACCAAAAGTAC
TTCTGGGATACCTGTAACCCCGTCGACGCCTTCAAAATCACGAACGGTGGTCTGGGCATC
TGGGGTGCAGTGATCCTCGGTGGCCTGGCAGTGGCCGTATTCTTCCGGTACAAAAAGCTT
GCTCTTGCACCTTTCGCAGATGCCGTGGCACCTGCAGTTATCCTGGCGCAGGGAATTGGT
GGTCTGGGCAACTGGTTTAACCAGGAGCTCTACGGTGCAGAAACTACCGTTCCATGGGCT
TTGGAAATCTACTATCGGGTAGATGAAAATGGAAAATTCGCACCGGTGACAGGAAGATCC
ACCGGTGAAGTAATGGCTACTGTTCATCCAACATTCCTCTATGAAGTGTTGTGGAACCTA
CTGATCTTCGCTTTGTTGATGTGGGCTGACAAGCGATTCAAGCTGGAACATGGCCGAGTA
TTTGCTCTCTACGTAGCTGGTTACACCTTGGGCGGTTTCTGGATTGAACAAATGCGCGTT
GATGAAGCCACGCTTATTGGCGGCATCCGAATGAACACGATCGTCTCCGCAGTAGTGTTT
GCCGGCGCGATCATCGTGTTGTTCCTGTTGAAGAAGGGTAGGGAAACTCCCGAAGAGGTA
GATCCGACTTTCGCAGCGTCTGTTGCAGCAGATGCTGTAGCTTCGCCAGATAGAAAACCC
TTGCCGAAAGCAGGGGAGGGCATTGATGGAGAAAGGCCCTCAACGCGA
>RXA01094-downstream
TAGGTTTCAACCATAGGCCTGAC
>RXA01135-upstream
CATTTACTAATCTCACAAGACATCGCCTAATGAATACAGACTAGCCTATTCAAATTCAAA
GAACACTCGGTATGGCACGTGATTTAAGGATGCTGCAATC
>RXA01135
GTGACACATATCCTCTTCGACAGCAGGCGTTTTCTGCAACTGGGCGCTTTTGCGTCCTTG
AGCACCGCATTGGCCGGAGCGGCCCGCTACGTGACGTCGACAAGCAATAATGAACCTGCG
GATAACACTCCCCTGACCATTGGCTACGTGCCTATTGCGGGCTCGGCGCCGATTGCTATC
GCAGATGCGCTAGGGCTGTTTAAGAAACACGGCGTGAATGTCACGTTGAAGAAGTACTCA
GGCTGGTCCGACCTGTGGACCGCCTATGCAACAGAGCAGCTTGATGTTGCGCAGATGCTG
TCGCCGATGACTGTGGCGATTAAT
>RXA01141
GTCAATTCAGCGGCGGATCTTAAAGGCATGGTGCTGGGAATTCCTTTTGAATATTCAGTC
CATGCGCTGCTCCTGCGCGATTATCTCGTCTCAAACGCAGTTGATCCCATCGCCGATCTT
GAGCTTCGCCTGGTCCGACCTGCCGATATGGTCGCACAATTGACAGTTGAGGGCATCGAT
GGATTCATTGGGCCTGGGCCGTTTAATGAACGCGCGATCAGCAATGGCTCCGGCCGGATT
TGGGTGCTGACCAAACAAGTGTGGGACAAACATCCATGCTGCGCCGTGGCGATGGCCAAA
GAGTGGAAAGCTGAACACCCCACGGCGGCTCAGGGTGTGCTTAATGCGCTGGAGGAAGCC
TCCGCAATTTTGAGCAATCCGGCACAATTTGATTGCTCGGCACGCACGCTGTCGCAGGAA
AAATACCTCAACCAGCCTGCCACGTTGCTGGATGGACCGTCG
>RXA01141-downstream
TAATCATCGGCATCACCGGCTTA
>RXA01142
ACCCGCACCCACCTCGAACAAGTAGGCCTCACCGACGCCGCCGAACGGCGCCCCGCCCGC
CTCTCCGGCGGCATGCAACAGCGAGTCGGCATCGCACGCGCCTTCGCCATCGACCCACCA
ATGATGCTTCTCGACGAACCCTTCGGAGCCCTCGACGCCCTCACCCGCCGCGAACTCCAG
CTCCAACTACTCAACATTTGGGAAGCCTCCCGCCGCACCGTCGTCATGGTCACCCACGAC
GTCGACGAGGCCATCCTGCTCTCCGACCGAGTTCTCGTGATGTCCAAGAGCCCCGAAGCC
ACCATCATCACCGATATTCCAGTGAATCTTCCCCGCCCCAGACACGAGCTGAGTGAAGAC
GCTTCTGTTGAAGCCGAGACCACAGCCCTGCGTAAGCGGATGCTGCATCTGCTGGAGCAC
>RXA01142-downstream
TAGTTTCTAACACGTCTTTTAAA
>RXA01164-upstream
GCCGATCGTGATTGATGAAGACGAGATCCAAGCGTGGACTTCTGATGTCAAACCTGAAGA
TTTCACCAAAGGTAAAGATGAATCCGACGGTGAGAAATAA
>RXA01164
GTGACAGTGTTTGTTCGGCTCGCCCTTGCTGCTGTGGGCGGGCTTTTTGTCTTTGGTTGC
AATGAACCGATCGGCTGGTTTGTCGGGGGAATTGTTGGCACTGCATTATTTTTTATCTCC
CTTGCGCCGTGGGATCTGGGAGTTCGCCAAAAGCGGCGGAAGAAGAATGAGCCAGTGCCA
TTTTTGCAACAGATGTCCACGGGCCGAACTGTTGTACAGGGCATGCTTTTAGGTTTTGTC
GATGGCCTGGTGACATATTTGCAGCTGTTGCCGTGGATCGGTGAGTTTGTTGGCTCACTG
CCTTATGTCGCGTTGTCAGTTGTCGAGGCGCTTTATTCCATTGCTCTTGGTGCTTTCGGC
GTGCTCATTGCGGGTTGGAGGGACTGGAAGGTTCTGCTGTTTCCGGCGATGTATGTGGCT
GTGGAGTATCTAACAAGCTCGTGGCCATTTGATGGATTCGCGTGGGTTCGCCTGGCATGG
GGTCAAATTAACGGTCCGTTGGCTAATCTCGGAGCGGTTGGTGGGGTAGGGTTTGTCACT
TTTTCCACGGTGCTGGCTGCCGTGGGTGTGGCGATGGTGATTATTTCCAAGAAGCGACTG
GCCGGCGCAATCATCACCGCGAGTGTGATTGCTATCGGCGGGGTGTCATCCCTGTACGTT
GACCGCAATGGCACGAGCGATGAAAGCATGGAAGTAGCCGCAATTCAGGGCAATGTGCCT
GGGATGGGATTGGACTTCAATGCACAGCGCCGCGCGGTGCTGGCGAATCACGCACGGGAA
ACCCTGAAGCTGGATGAACAAGTGGATTTGGTGATCTGGCCGGAGAATTCCTCAGACGTC
AACCCATTTTCCGATGCACAAGCAAGAGCCATTATCGATGGAGCAGTGGAAGATGTTCAG
GCACCTATTTTGGTGGGGACGATCACCGTCGATGAGGTTGGTCCACGCAACACCATGCAG
GTATTTGATCCTGTTGAAGGTGCGGCGGAGTACCACAATAAGAAGTTCTTGCAGCCGTTT
GGTGAATACATGCGGTTTCGCGAATTCCTGAGAATTTTCTGGCCCTACGTTGATTCCGCT
GGAAACTTCCAGCGCGGTGATGGCACCGGCGTAGTGGAGATGAATGCTGCGAACTTAGGG
CGCGCTGTGACAGTGGGCGTGATGACGTGTTACGAGGTCATCTTCGACCGTGCTGGCCGC
GACGCCATCGCCAATGGGGCTGAATTTTTGACCACGCCCACGAACAACGCCACCTTCGGA
TTCACGGACATGACGTATCAGCAATTAGCAATGAGCAGGATGCGTGCCATCGAATTTGAT
AGGGCGGTGGTTGTTGCAGCTACATCGGGTGTTTCGGCTATCGTCAACCCTGATGGAAGC
ATTTCCCAAAACACCGGAATTTTTGAGGCCGCCACCTTGACGGAATCCATTCCACTCAAG
GACACTGTCACCATCGCAGCGCGGGTTGGTTTCTATGTTGAATTACTGTTGGTTATCATT
GGTGTATTAGCTGGACTATTCGCCATTCGAATGAATAGCCGTTCAAAGTCTGCGAAAGGT
TCCGCTCGGCCCGCA
>RXA01168
CGCACCGCAACCCCTGACGTTCACGTACTCATCGTGGACGACAACAGCCCAGACGGCACC
GGCGAGCGCGCAGACAAGCTTGCTGCTGACGACGACCACATTTTTGTCCTCCACCGCGAA
GGCAAAGGCGGCCTGTGCGCAGAGTACATGGCTGGCTTCCAGTGGGGCCTGGAGCGCGAC
TACCAGGTCCTGTGCGAAATGGACGCCGACGGCTCCCACGCACCAGAACAGCTGCACCTG
CTGCTCGCTGAGATCACCAATGGCGCTGACCTGGTCATCGGCTCGCGCTACGTGCCAGGC
GGCCGCGTAGTCAACTGGCCCAAGAACCGTTGGCTCTTGTCCAAGGGCGGCAACGTCTAC
ATCAGCGTCGCGCTCGGCGCCGGCTTGACCGATATGACCGCAGGGTACCGCGCTTTTCGA
GGTGAAGTGCTAGAAGCAGTGCCGCTTGATGAGCTCTCCAACGCTGGGTACATTTTCCAA
GTTGAGATTGCCTACCGTGGAGTTGAAGCCGGATTCGATGTTCGTGAAGTTCCCATCACT
TTCACCGAGCGTGAGATCGGCGAATCCAAGCTGGACGGCAGCTTTGTCAAGGATTCCGTG
CTCGAGGTAACCAAGTGGGGCGTCAAGCACCGCGGTGGCCAGGCCAAGGAACTGTCCAAG
GAAATGGTCGGGCTGCTGAACTATGAGTGGAAGCACTTCAAAAAGCGGAACACCTGGCTC
>RXA01168-downstream
TAAACTGCTTGCCGGTTAGTGAA
>RXA01185-upstream
TCAGCTGGTAGCGTCGCATGTATTATTGGTGCTTTTCACTAATAGCAATGCACTAACGCA
CATAGCCGCCGACACGTGAATCGAAAGAAGTTCATCTCCG
>RXA01185
ATGACTGATCCTGAAAACTCGCAAGGAACCCCACAGATTTGTCCGACTGATCCGACTACG
CAAGCATTAGGAGTTCGGGGCTTAACCAAGTCCTATGGTGATGCAACAGTAGTGAACAAT
ATCAATCTGGACATCCCCAAAGGAGCCATTTACGGCATCGTTGGACCTAATGGTGCAGGT
AAAACCAGGATGCTGTCCATGGCAACGGGTTTACTGAGGCCGAATAAAGGCAGCGCGTGG
ATTTCGGGTTTCAATGTGTGGGAAGAGCCAAACGATGCAAAACGAAGCATGGGATTGTTG
GCAGATGGCTTGCCCATCTTTGATCGCTTGACTGGCAAAGAACTGCTCACATATGTCGGG
GCATTGCGTGAGTTGGATGAAGGCATTGTTGATCAACGTAGTGAGGAATTGCTGGAGGCG
CTCGGGCTTAAAGAAGCAGCGGGCAAGAGAGTCGTCGACTATTGCGCCGGCATGACGAAG
AAGATTCTTTTGGCCCAGGCCGTCATTCACAATCCGAAAGTGCTCATCCTTGATGAACCT
TTGGAAGCGGTTGATCCGGTGTCTGGTCGTTTGATTCAGCAGATTTTGAAGAAGTTTGGG
CAAACGGGTGGAACCGTCGTTTTGAGTTCGCATGTGATGGAATTGGTTGAGGGGTTGTGG
GATCACGTTGCCATCATCAACAGGGGAGTGGTGGAGATTGCCGGACATGTGAATGAGGTT
CGTCGGGGCAGATCTTACCGGATGTCTTCGTTAATGCGGTTGAAGGCGCTGCTGTTCAAG
AGGGGTCACTATCTTGGTTGGGTGCGTCCGAAGGCCATAGCGAAGGCCAAAATCAGAACG
AGGATCGGGCTGAGTAAA
>RXA01185-downstream
TGACTAAAACACTTCTGAAACTA
>RXA01188-upstream
AAACAGTTAGAAGCAGCTAAACAGTTTTTCCGATAACTGTTGTCATTTTGTGACCGCCTG
GCTTTGTAGTTTTCGCTCCGGTGTCCAAGATGAATATGAC
>RXA01188
ATGATGAATGGCGTGGTAGAGCCTCAGGAACATCTCGATGCAACGTTGATTGCTGCAGAC
TTCCACGGCAACCCCGAAAACTCTGGTGACCGCAAAGAGCGCCTGAATTTTCAAGGTTGG
AAGTATGCCCTTAATCGCACGGTCAGGGATGTTTTTCCAGATGGCCTGCTCGATTTGGCG
GCCTTGTTGACGTTCTTTTCCATTCTGTCGATCGCCCCTGCAGTGCTGCTGGGCTATTGG
GTGATCACGATTTTTCTGGCCAGTGACTCCACCGAAATCCTCAACCTTGTCCGCGATGAG
GTAAATCAGTACGTTCCGGAAGATCAATGGCATGTTGTCAACGGCGTGATTGATTCGATC
GCAGGCTCGGCAGCTGCAGGTCAGGTCGGTGTCGCGGTCGGTGTGATCACGGCATTGTGG
ACATCTTCGGCATATGTGCGCGCTTTTTCCAGATGTGCCAACGCTGTTTATGGCCGAAGC
GAAGGCCGCACATTGATCAAACGCTGGGCAATGCTGCTTTTCCTCAACCTTGCTTTGGTG
CTTGGAATCATCATCATTTTGGTCTCCTGGGTGCTCAACGAGACCTTGGTGATGGGAATT
TTCGCCCGCATCGCGGAACCACTTCATCTCACGAATGTGCTCAGCTTCCTCACGGACCGG
TTCATGCCGATCTGGATCTGGGTGCGGTTCCGAGTGATTGTGGGGGTGCTCATCATGTTC
GTGGCCACGCTGTATTACTGGGCCCCGAACGCCCGCCCGTGGAAGTTTCGCTGGCTCAGC
CTCGGATCATTCTTGGCGATCGTTGGCATCCTGCTCGCAGGCGTGGGCTTGAATTTCTAC
TTCACGCTGTTCGCCGCTTTTAGTTCCTACGGCGCGGTGGGTTCGCTGCTCGCGGTTTTT
ATTGCGCTGTGGGTGTTCAACATTTGCTTAATCATCGGCCTGAAAATCGACGTGGAGATC
AGCCGCGCCAAGCAACTGCAGGCAGGAATGCCGGCGGAGGATTACAGTTTAGTGCCACCA
CGCTCTATCGAGAAGGTGGCGAAAATGAAGCAGCGCCAGCAGCGCTTGATGGATCAGGCT
GCGGCGATCCGGGAGGAAAGCAAT
>RXA01188-downstream
TAAAAAATTGCTTATCGACGTCC
>RXA01245
GCCTCCTGGGTCACCACGCTGGGGCTGGGCGGGTTCCACCTAGATTTCTGGTGGGAACTG
GCCCTGCTGGTGACGATAATGCTGTTGGGCCACTGGCTGGAGATGCGCGCTCTTGGTGCA
GCCTCCTCCGCGCTTGAGGCGCTGGCAGCGCTCCTGCCCGATGAGGCCGAGAAGGTCGTG
GACGGGACCACCCGCACCGTAGCGATCTCAGAGCTGGGGGTCGACGATGTGGTGCTGGTG
GGAGCAGGTGCCGGCGTCCCGGCCGACGGGACCATGATGGACGGAGCGGCCGAATTCGAT
GAGGCCATGATCACCGGCGAATCCCGACCCGTCTACCGGGATACCGGTGAGACCGTGGTG
GCCGGCACCGTGGGCACCGACAACACCGTCCGTATCCGGGTGGAGGCCACCGGTGGGGAC
ACCGCCCTGGCAGGCATCCAGCGCATGGTCGCCGACGCCCAGGCCTCCTCCTCCCGGGCC
CAGGCCCTGGCCGATCGAGCCGCAGCCTTACTGTTCTGGTTCGCCCTGATCACGGCCCTG
ATCACCGCCGTGGTCTGGACCATCATCGGCAGCCCCGACGATGCCGTGGTCCGCGCGGTG
ACCGTGCTGATCATCGCCTGCCCGCACGCCCTGGGCCTGGCCATCCCGCTGGTCATCGCG
ATCTCCTCCGAGCGCGCCGCGAAATCCGGGGTGCTCATCAAGGACCGCATGGCACTCGAG
CACATGCGCACCATCGACGTCGTCTTGTTCGATAAGACCGGCACCCTGACCGAAGGCGCA
CACGCCGTCACCGGCGTGGCTCCGGCCACGGGTATCGCCGAGGGTGAGCTGCTGGCCCTG
GCCGCCGCCGCTGAGGCCGATAGTGAGCACCCCGTGGCCCGCGCGATCGTGACTGCCGCG
GCCGCACACCCGGAGGCCTCGCAGCGTCAGCTGCGCGCAACCGGTTTCACCGCCGCCTCC
GGCCGCGGGATCCGGGCCACCGTGGACGGTGCCGAAATCCTCGTGGGCGGGCCGAACATG
CTACGCGAGTTCAATCTGACCACCCCGGGTGAGCTCGCCGACATCACCGGTTCCTGGGCA
GAGCGAGGTGCCGGAGTGGTACATGTCGTCCGCGACGGTGAGATCATCGGTGCGGTGGCA
GTGGAGGACAAAATCCGCCCCGAATCCCGCGCGGCGGTACGCGCCCTGCAGGCCCGCGGG
GTGAAGGTGGCGATGATCACCGGTGACGCCACCCAGGTCGCCCAGGCAGTGGGCAAGGAT
CTGGGGATCGATGAGGTCTTCGCCGAGGTTCTGCCGCAGGACAAGGACACCAAGGTCACC
CAGCTGCAGGAGCGCGGTCTGAGCGTGGCCATGGTCGGCGACGGTGTCAATGACGCCCCG
GCCCTGGCCCGGGCCGAGGTCGGTATTGCGATTGGCGCGGGTACAGATGTGGCGATGGAG
TCCGCCGGGGTGGTCCTGGCCAGTGATGATCCCCGGGCGGTGCTGTCGATGATCGAGCTC
TCCCATGCCAGCTACCGGAAGATGGTCCAGAAGCTGGTCTGGGCGACCGGGTACAAGATC
GTGGCCGTTCCGCTGGCGGCCGGTGTGCTCGGCCCTATCGGTGTGCTGCTTCCGCCGGCG
GCGGCCGCCATCTTGATGTCCCTGTCCACGATCATGGTCGCCCTCAACGCCCAGGTGCTA
CGCCGGATCGACCTGGACCCGGCTCACCTAGCTCCGACCGACGGGAAGGAGGAGAAGGCT
GCTGTGAGCTCTGCAGCCCCCGTCCGC
>RXA01245-downstream
TGACTTTCAATGCTTCATGGACT
>RXA01247-upstream
TCCGATGACCACCCCGACTTCCCCCTTGCTGCCGCTGGCCTCCGACGGTTGTGGATGCTG
CGCGCGCTCTACACCGTCCGCGAGCGTCTCCGCCTCGGCC
>RXA01247
GTGGCCGCGGCAACCGACGCAACACCTGAAGGTCCCACCACCTACCAGGTCACAGGCATG
ACCTGCGGACACTGCGGCGACAACGTCACCGAGGCGGTGAGCGCTCTGCCCCAGGTCGAC
GACGTCCAGGTCGACCTCATCGCCGGTGGGGTCTCCATCGTCACGGTCACGGGTTCCGTG
CCCCTGGAAACCGTCCACCGGGCAATTGAGGAGACCGGCTACACCGTCTTGTCC
>RXA01247-downstream
TGATCGATTCACCCATGATCTCG
>RXA01285
CCACAGACCTCCATCGGCCCAGAAGGCATCCGGGTTTACGATCTCATGGCGCGCGGGCGC
GCTCCCTACCAAAGCCTCATACAACAATGGCGCACCTCCGACGAAGAGGCCGTCGCGCAA
GCGCTCGCCTCCACGAATCTCACCGAACTTGCAGCTCGCCTCGTCGATGAACTCTCCGGT
GGCCAGCGCCAACGAGTGTGGGTGGCCATGTTGCTCGCCCAGCAAACACCGATCATGCTT
CTCGACGAGCCCACCACGTTCCTCGACATCGCCCACCAATACGAACTCTTGGAATTGCTG
CGCGCATTCAACGAGGCCGGGAAAACTGTGGTCACTGTGCTTCACGATCTCAACCAAGCC
GCCCGCTACGCCGACCACCTCATCGTGATGAAAGATGGGCACGTACATGCCACGGGCACA
CGGGAGGAAGTCTTAACTGCGGAGATGGTTCAAGGAGTTTTTGGCCTGCCCTGCATCATC
TCCCCAGACCCCGTCACAGGAACCCCCACCGTCGTTCCCCTCAGTCGGTCTCGCGCAGGA
GCT
>RXA01285-downstream
TAAGTAGGTACGCGTCCAACGGA
>RXA01289-upstream
CTCACCTAAGATGTTGTAAGCGTTTTAGTTTCAGCTAGTTTTAAGGAGTTTCGATGTCTG
ATACTTTTCTTTCCCCCTCGATCTTTAGGAGTCACGCGAT
>RXA01289
ATGACGGCGGTGGCGGTAGAGAAGCAGAAGGAGACGTCGATAAGCAAAAACCTCGGCAGG
CGCCGAGCGCTGGGCATTCTCGGAATCGTCGTGGCACTGGGTGCGCTTATTGTTTTAAGT
ATTGCTGTGGGTGCGAACCCACTTTCTTTTAGCTCCGTATGGCAGGGTTTTACCGCACAC
GACAGCTCTGAGGCGTCGATTATCGTGTGGTCAATGCGTATTCCGCGCACGCTGGTGGGC
ATCGTGACTGGCGCTGCTTTTGGTGTGGCGGGTGCTTTAATTCAAGCGCTGACGCGCAAC
CCGCTTGCCGATCCCGGAATTTTGGGAGTTAACGCGGGTGCAGGTTTCGCAGTGACCGTA
GGTGTCGGATTTTTCGGACTCAGCAGCGTGACGGGCTACATCTGGTTGGCATTCCTGGGC
GCTGCCGCCGCTACCCTGCTGGTGTATTTCATTGGTGCGAGCACCAGCGGCAGCGTTAAT
CCTGTTGCTCTGGTCCTCGCCGGCGTTGCTCTGGCCGCCGTGCTTGGTGGCGTCACGAGC
TTCCTCACACTGATTGATGCTGAGACTTTTGAAAGCATCCGCAATTGGAATCTTGGTTCT
GTTGCACGCACCGACCTCAGCGACACCATGACCGTATTGCCATTCCTGGCAGTCGGACTG
GCCATCGGGCTCCTGCTGTCGGGAGCACTGAACTCCATTGCGCTTGGCGATGACCTTGCT
GCATGCCTGGGCACCAAAGTGATGGGCACCCGCGTGCTCGGCATGATTTCAGTCACCTTG
TTGGCCGGCGGCGCGAGCGCCCTTAGTGGTGGTATCGGCTTCGTAGGCCTTATGGTTCCC
CACGTTGTGCGCTGGGTAGTTGGCCGCGATCAACGATGGATCATCACCTTCAGCGCCCTG
TGCGCCCCTGTTCTTGTAGTCGGCGCAGACATTTTGGGACGCATCATCGCCCGCCGCGGC
GAAATTGAAGTAGGCATTGTTACCGCAGTCATCGGCGCACCTGTCCTGATCGGACTAGTT
CGACGGAGGAAAGCCAGTGGTCTT
>RXA01289-downstream
TAATATCAAATCTAGAACTGATG
>RXA01290-upstream
GGACGCATCATCGCCCGCCCCGGCGAAATTGAAGTAGGCATTGTTACCGCAGTCATCGGC
GCACCTGTCCTGATGGCACTAGTTCGACGGAGGAAAGCCA
>RXA01290
GTGGTCTTTAATATCAAATCTAGAACTGATGAAACTCGTGTTGCTGCGTCTGAGGCGGTG
GAATCCACTAGACCTGTGTCTGAAGCTTCGACAAGCCCTGCGCTTAACCCCGGCTACCAC
GCAGTTTCAGTGCAGAGGCGCCGGTTCTCTTTCCGCATCCCAGCCCGCCTCATGGTGGTT
AGCCTTATCCTTTTCGCGATCGCGCTATGCAGCGCCAGATGGGCTATCACGATGGGCGAT
TACCCACTGTCTTTGGGGCAGGTGATTAATGGACTTGCTGGCACCGGCGAGAAATTCCAG
TTGTTGGTGGTGCGGGAATGGCGTGTACCTGTAGCCATTGCTGCTGTTGTCTTCGGCGCG
CTGCTTGGCATAGGTGGAGCGATTTTCCAGTCGATTACTCGAAACCCGTTGGGTTCACGT
GAGGTGATTGGTTTCGATGCAGGTTCTTACACGGCGGTGGTTCTTGTCATTTTGGTCCTG
GGCAACACTCACTACTGGAGCATCGCTTTCGCTGCCATCGTCGGTGGCATTGTTACGGCC
TTTGCCGTGTATGTCCTGGCGTGGCGTAAAGGTGTGCAAGGTTTCCGCTTGATCATCGTG
GGCATCGGTGTCTCGGCCATGCTCAGTTCGGTTAACGCGTATCTAATGACCCGCGGCGAT
GTGGAAGACGCCATGGTTGTGGGCTTCTGGAGTGCCGGTTCCATCAACCGCATTACCTGG
CAATCTCTGCTCCCCTCTCTGGTGATCGCTGCTGTCATCATCGTGGCCGCCATTGTGCTG
GCAAGGTCACTGCGTTTCATGGAAATGGGCGATGACGTAGCCACCACCCTCGGTGTGAAA
ACAAACTCCACCCGCTTGGCACTCATCGTTGTCGGCGTTGCTACCTCCGCGTTGGTTACA
GCAGCTGCCGGACCGATCTCCTTCATCGCGTTGGTTGCCCCACAGCTGGCACGTCGCCTC
ACTAAAACCCCTGGTGTCAGCCTGGTTGCTGCCGCTGCAATGGGTTCCGCACTGCTCAGC
TGCGCTCACCTCCTTTCCCTGATTATCAGCTCCTTCTACCGCACCATCCCGGTTGGCCTG
TTGACTGTATCCATCGGTGGTTGCTAGATGATGTGGCTTCTGCTGCGCGAAACCCGCCGC
CAATACCGCACCGGCACCATCCGA
>RXA01290-downstream
TAGTTCTTTTAAGGATCCCTCAT
>RXA01297-upstream
TCCTGTTGCTGCTGATTATCACTGTTATCCAGGTTCGATACATGGATAAGGAGAACAAGC
AGAAATGATCTCGACTGATAGAAACGTTTTGGTCAAAATC
>RXA01297
ATGGGCTATGTCGGCATGGTTCTTGCCATCTTGTTCATTGGCCTTCCGCTGGTATTTATT
GTGCTGACTAGCTTCAAGCAGCAGTCAGAGATTTACACCCAGCCGGTCACGTGGTTGCCT
TCGGAATTTAATTTCGATAACTATGCAAATGTTTTCGAGCGGGTTCCGTTCCTGAAGTAC
TTCCGCAACTCGATCATCATCACGGTTATTTTGTGTCTGGTGAAGATTATCTTGGGTGTG
ATCTCTGCATATGCGTTGTCGATTTTGCGCTTCCCGGGTCGAAACCTTGTGTTCTTGCTG
GTTATCTCCGCGCTGATGGTGCCTTCCGAAGTGACTGTTATTTCCAACTATGCGTTGGTC
AGTCAGCTTGGTTGGCGCGATACCTACCAGGGCATCATCGTTCCGCTAGCGGGTATTGCT
TTCGGAACGTTCCTCATGCGTAACCACTTCATGTCTATTCCTTCTGAGCTCATTGAAGCT
GCGCGAATGGATCACTGTGGACACTTCAGGTTGCTCTGGAAGGTTTTGCTTCCAATCTCT
ATGCCTACGTTGGTGGCGTTCTCCATGATCACCGTGGTGAATGAATGGAACCAATACCTG
TGGCCTTTCCTGATGGCAGAAACCGATAATTCAGCAACTCTGCCCATTGGTTTGACCATG
CTTCAAAACAATGAGGGTGTCTCCAACTGGGGACCTGTCATGGCCGCAACGATCATGACC
ATGTTGCCTGTGCTTGTGATGTTCTTGGCACTGCAGGAGTACATGATCAAGGGACTTATG
TCCGGCGGCGTCAAGGGC
>RXA01297-downstream
TAAAAACTTCTCGCTAAAAACTT
>RXA01298
TTCGTGTGGAAGAACTTGGGCTACTCCTTTGTTATCTACGTGGCTGCATTGCAGGGGCTA
AACAAGGATTTGTCTGAGGCCGCACCGGTGGATGGCGCGAGCGCGTGGACACGTTTTTGG
AAGGTTAGTCTTCGGCAGCTTCGCCCAACCACGTTCTTCCTTTCTATTACTGTCACGCTG
AACTCGGTTCAGGTCTTCGACATGATTCACACCATGACTCGTGGTGGCCCCTTGGGTAAC
GGTACGACCACGTTGGTTTACGAGGTGTACACCGAGACTTTCACGAACTATCGGGGGGGA
TATGGTGCAACAATCGCAACGATTTTGTTCCTGTTGCTGCTGATTATGACTGTTATCCAG
GTTCGATACATGGATAAGGAGAACAAGCAGAAA
>RXA01298-downstream
TGATCTCGACTGATAGAAACGTT
>RXA01303-upstream
AACATGCGGGCGCAGGTCAGAGCTGTTATCTTAGTACTTATCACAGCCATAGGGCGGGCT
TGACGGAAAGCCTTTCCGCGTAACGATGAAGAGGGATCAC
>RXA01303
GTGACACAACTCAACACCAAAGGCGTTGTTCTGCAAGGGTGGGATCCAGAAGATCCTGAA
CATTGGGACTCGAAAATTGCATGGCGAACCCTGTGGATTACGACCTTGTCCATGATTATT
GGGTTCTGCGTGTGGTATTTGGTTTCTGCCATCGGTCCGCTACTCAATCGAATTGGATTT
GATCTCTCAGCAGGTCAGCTTTATTGGCTCGCATCTATGCCCGGTTTGGCCGGCGGATTA
ATCCGATTGATTTACATGTTCCTTCCACCGATTCTTGGAACCCGCAAATTGGTGGGAATT
TCCTCCGGTCTATTTTTGATCCCCATGTTTGGGTGGTTCCTGGCTGTCCAAGATTCAAGC
AGTCCCTAGTGGTGGCTTCTCACACTCGGTGCACTCACTGGGATTGGTGGTGGGGTGTTC
TCTGGATATATGCCGTCCACGGGATACTTCTTCCCCAAGGCAAAATCGGGCACTGCGCTG
GGCATTCAGGCAGGTATCGGCAACCTCGGCGTCTCGATAATTCAGTTCATGGGCCGATGG
GTCATGGGTTTCGGTCTGCTGGGCATTGGTTTCCTCACCCCGCAGCGCACCATTGAAGGC
ACCACGGTGTTTGTGCACAATGCTGCGATTGTGTTGGTCCGGTGGACTATTCTCGCGGCC
GTTTTATCGTTCCTGTTTCTTAAAGATGTCCCAGTCACCGCAAATTTCCGGCAACAGATC
GATATCTTTGGCAACAAGAACACATGGATTTTGTGCATTATCTACTTGATGACATTCGGT
GCCTTCGCCGGTTTCGCCGCGCAGTTCGGTCTGATCATCAACAACAACTTCGGCATCGCT
TCCCCGATGGCAGAGACTTATCCAGCTGAGATGCTTCACGCCGGTGCTACGTTCGCGTTT
CTTGGACCTTTGATTGGTGCTTTGGTGCGTGCTGCATGGGGTCCACTGTGTGACAGATTC
GGTGGAGCTATCTGGACGTTTGTCGGTGGCATCGGAATGACTATCGCCACTGCAGCTGCC
GCAATCTTCCTAAGCAGAGCGGAGACACCTGATGATTTCTGGCCATTCCTGTGGTCCATG
CTTGCCCTGTTCTTCTTCACCGGTCTGGGCAATGCTGGCACCTTGAAACAAATGCCCATG
ATTTTGCCTAAACGCCAAGCAGGTGGCGTGATCGGCTGGACCGGTGCCATTGGTGCCTTC
GGCCCCTTCATTGTCGGTGTCTTGCTCTCCTTCACTCCAACTGTCGCGTTCTTCTGGGGC
TGCGTGGTGTTCTTCATCATCGCCACGGCTTTGACCTGGATCTAGTACGCCCGCCCGAAC
GCTCCATTCCCGGGA
>RXA01303-downstream
TAAACCGAAAGGCCAATCCATGA
>RXA01323-upstream
CACGTGGTTTACGCCAGGCATGTTCCCGCGAAGGGTTGACCCATACCCCTAGGGGGTATA
CAGTGAGTCATGTAAACATACTCGCAGAAGGAGGGATCCC
>RXA01323
ATGGCTCAGACACCCGCCAAAATCCCGGCGGCACTGAATTTCATTGACGTCGACCTCGGC
GTTACGGGCATGACCTGCACTTCTTGCTCCGCGGGCGTCGAGCGCAAACTGAACAAGCTC
GACGGCGTTGAAGCAACCGTCAACTACGCGACGGAATCCGCACAGGTCAGCTACGACCGC
TCAAAGGTCAGCCCTGAACAGCTGATTAAGACTGTTGAGGACACCGGCTACGGTGCTTTC
ACGATGGCTTCCGCAGCTGCCGAATCAGAAGAGGACAACGCTCCAGCTGACAGCGGCCAG
TCCCGGATCGACGCAGCTCGCGACCACGAAGCAGCCGACCTGAAACACCGCGTGATCGTC
TCTGCACTGTTGTCAGTTCCTGTGGTTTTGGTCAGCATGATCCCGGCGCTGCAATTCAAC
AACTGGCAGTGGGCCGTACTCACTTTGGTCACCCCGATTTTCTTGTGGGGCGGTTCACCG
TTCCACAAGGCAACGTGGGCAAACGTGAAGCGCGGTTCCTTCACGATGAACACCCTGGTT
TCACTCGGCACGTCCGCTGCTGACCTGTGGTCCCTGTGGGCTTTGTTCATTGAAAATGCT
GGTCACCCTGGCATGAAGATGGAGATGCACCTGCTGCCGTCGGCCTCCACGATGGATGAG
ATTTACCTCGAAACCGTGGGGGTCGTTATTACGTTCGTGCTGCTTGGACGCTGGTTTGAG
ACAAAAGCTAAGGGCGAATCTTCGGAAGCTCTGCGCAAGCTGCTGGACATGGGCGCCAAA
GATGCAGTCGTCTTACGTGACGGCGCCGAAGTCCGGGTTGCTGTGAATCAGCTTAAACTC
GGCGACGTTTTCATCACCCGCCCCGGCGAGAAAATGGCCACCGACGGTGAAGTCGACGAA
GGTTCCTCCGCAGTCGACGAATCCATGCTCACCGGCGAATCCATCCCGGTTGAAGTCACC
AAGGGCTCCAAAGTTACCGGCGCAACGCTGAAGACTTCCGGCCGCCTCATGGTGAAAGTA
ACCCGCATCGGGGCCGACACCACCCTGTCGCAAATGGCTAAACTGGTCACGGACGCAGAG
TCCAAAAAGGCCCCTGTCCAGCGTCTTGTTGACCAAATCTCGCAGGTTTTGGTTCGCGTT
GTCATCGTAATTGCTATTGCGACGCTGATCGGGCACCTGGTGTTCACGGACGCCGGCCTC
GCCCCAGCATTCACCGCAGGAGTCGCCGTGCTCATTATCGCGTGCCCTTGTGCCCTCGGC
CTGGCAACCCCAACCGGACTTCTGGTCGGAACCGGCCGCGGCGCGCAACTTGGTCTGTTG
ATCAAGGGCGCTGAAATCCTCGAATCCACCAAAAAAGTCGACAGGATCGTCCTCGACAAA
ACCGGCACCGTCACCACCGGCACCATGTCCGTCACCGACGTCAGCGCCATCAACTACAGC
GAAACCGAAATCCTGGAATTCGCTGCAGCCGTCGAGTCCGCCTCGGAACACCCCATCGCC
CAGGCAATGGCCAAGGCCGCCGAACACGAGGAAGTCACCGACTTCCAAAAGACGGCAGGT
CAGGAAGTCACCGGTGTAGTCCGCGGACAGGAGGTCCGCGTGGGCAGGCCTTCAAGCACG
CTTATCGACGGCCTGCTCCACCCCTTGCAACACGCCCAAAAAATCGGCGGAACCCCCGTA
GTCGTCACGATTGACGGCGTAGATTCGGGAATAATCACGGTCCGCGACACCGTCAAAGAC
ACCTCCGCCGAAGCAATCCGCGGACTCAAGGAACTGGGACTCACCCCAATCCTACTCACC
GGAGACAATGAAGGCGCAGCTAAATCCGTAGGCGCTGAAGTCGGCATCGACCAAGTCATC
GCCAACGTCCTCCCCCACGAAAAAGTCCAAAACGTAGAAGCCCTCCAAGCACAAGGCAAA
AACGTTGCGATGGTCGGGGACGGCGTCAAGGATGCCGGAGCTCTTGCCCAAGCTGAGGTC
GGAGTCGCCATGGGAGCCGGCACCGACGTAGGCATCGAAGCCTCCGACATCACCCTCATG
AACAACGAGCTCCGATCCGCAGTCGACGCCATCCGACTGTGCCGTAAAACGCTCGGCACC
ATCAAGGGAAACCTTTTCTGGGCTTTCGCCTACAATGTTGCACTAATCCCAGTAGCGGCG
ATCGGACTCCTCAACCCAATGCTTGCCGGCATTGCGATGGCCTTCAGTTCAGTTTTCGTC
GTCTCCAATTCCTTGGGTCTGCGAGGATTCAAAGCAAGGAGCAAC
>RXA01323-downstream
TAATGTCCAACAGCGAATGCCAC
>RXA01338-upstream
ATCCTTGCCTTGCCAAGGGAAGCCTGTACATGCTGGTCAGGGACATTTTTATGGGTGATA
ATGGGGTTTATGAATAAAAACTTATACCCCAAATCCCTGG
>RXA01338
ATGTTATTCATCCGCTCATTTGATGGCATCATCACTGTCGCAGCCCTTGTTGCCATCGCA
ATACATCTCATTTTATGGCTGGCTCTAGATCTAGATGGCCTTGCTAAAAACTGGCCTTTA
ATAGCCATCGTTATCGTAGGTGGCATTCCGTTGATGTGGGATGTGCTGAAATCAGCCATT
AAAACTCGCGGTGGGGCGGATACTTTAGCAGGAGTCTCCATCATTACTTCTGTGTTGTTA
GGGGAGTGGTTGGTTGCCGCGATCATCGTGCTCATGCTCTCTGGTGGTGAAGGGCTAGAA
GAGGCAGCATCACGGCGAGCCAGTGGCACCTTGGACGCACTTGCCCGGCGCGCACCAAGT
ACAGCTCACCGCGTGTTGGGTGCAAGGATTGTTGATGGAACCGAAGAGATGGCGGTGGAA
GAGATCACGGTTGGTGATTTAGTGGCGGTGGTCCCGCATGAACTTTGTCCCGTGGATGGT
GAAATCGTGGGAGGCCACGGCACGATGGATGAGTCTTATCTCACGGGTGAGCCCTATGTG
GTGAGTAAATCTAAAGGTTCGCAAGCAATGTGGGGTGCAGTCAATGGTGATACTCCGCTG
ACGATTGTTGCGACAAAGCTTGCCCATGATTCCAGATAGGCCCAAATTGTTGGTGTACTC
CATGAAGCAGAAAACAACCGCCCAGAAATGCGCAGGATGGCTGACCGTCTTGGCGCGTGG
TATACGGTGATTGCACTTGCCCTCGGTGGTCTTGGCTGGATTGTCTCCGGCGACCCAGTG
AGGTTCTTGGCTGTTGTCGTTGTCGCCACCCCATGTGCATTGCTCATTGCAGTGCCAGTG
GCGATCATCGGTGCGATTTCTCTTGCGGCTCGTCGGGGCATCATCGTGAAGAACCCTGGA
ATGCTGGAAAACGCTTCAGGAGTAAAGACAGTGATGTTCGATAAGACTGGAACGCTCACC
TATGGCAGGCCAGTGATTACTGATATCCACACTGCTCCCGGAGTTGAGGAAGATACAGTC
CTAGCTTTGGCTGCTTCAGTAGAGCGCTACTCCAGACACCCGTTGGCTGACGCGATTCGT
GAGGGCGCAAAAGCCAGGGAACTTCATCTGCCTGATGTAGTGGAAGTATCGGAACGTCCA
GGACAGGGACTAACCGGCACGGTGGGCGAGGACCTGGTTCGAATAACCAATAGGCGCAGC
ACACTAGAAATTGATGCAGACAGCAAGAACTACATTCCGGTGACAAGTTCCGGCATGGAA
TCTGTGGTGCTTGTTGATGATAAATATGCAGGACTCATTCGCCTCGGGGATGAACCTCGT
GCATCTGCCAGTGAGTTCATCGCGCACTTGCCCAAGAAGCACAAAGTGGACAAGCTCATG
ATTATCTCTGGTGATCGCGCATCTGAGGTTCGTTACCTTGCGGACAAGGTTGGCATTGAT
GAGGTACACGCAGAGGGCTCACCGGAAGACAAGCTGAACATTGTTAATCGGCATAATGAG
CACGGGGCCACCATGTTCTTAGGTGATGGAATCAACGATGCGCCAGCGATGGCCGTTGCC
ACCGTTGGTGTCGCGATGGGAGCAGACTCCGATGTCACGTCCGAAGCAGGAGATGCTGTG
ATTTTGGATTCTTCCCTGGAACGTGTCGACGATCTGGTCCACATCAGTGCACGGATGCGT
CGAATAGCGTTGCAATCTGGGGGCGGTGGCATGGCGTTGAGTGTCATAGGAATGATCCTC
GCGGTATTTGGATTCTTGACGCGAGTGATGGGTGCGATCTTCCAAGAGGTCATTGACGTG
CTGGCTATCCTCAATTCGGCTGGGGTCGCACTGCCACGCGGAGCGATTAGTGATTTTGAT
ACGCAAGAAAAAGTTTCT
>RXA01338-downstream
TAGCAGGGTAACCTAAATGTCGT
>RXA01395-upstream
CTCAAAAGCACTGATAAAAGCAGTCAACCCACCTCGGGTTGGCTGCTTTTTTGCATCCAG
ATGCACAAAGCGGTGGCACAAACGAGACAAAGTGAGCACA
>RXA01395
ATGGCTGTCATGGCATATCAACCAGCAGACAATCGCTATGACGACATGATCTACCGGAGG
GTGGGAAATTCTGGGCTGAAGCTTCCGGCAATTTCGCTTGGGCTGTGGCACAACTTCGGT
GATGACAAGCCGGTTTGAACGGAGCGCAGCATTATTCACCGCGCGTTTGATAGGGGAGTC
ACTCACTTCGATTTGGCTAATAACTATGGACCTCCAGCAGGTTGCGCAGAGACCAACTTT
GGCAGGATTTTGCGTGAGGATCTCAAAAGGGACCGCGATGAGTTGATCATTTCTTCCAAG
GCGGGTTGGGATATGTGGCCTGGACCTTATGGTTTTGGTGGTTCCCGAAAGTATCTAGTG
AGTTCCCTTGATCAGTCCCTGACTCGCCTCGGCTTGGATTACGTGGATATTTTCTATCAT
CACCGCCCGGATCCAGATACTCCTTTGGAAGAAACCATGTACGCATTGCGTGACATTGTT
GCGTCTGGAAAGGCTCTTTAGGTGGGTATTTCTTCCTACGGTCCAGAGCTCACAGCGGAG
GCGGCTGAGTTCATGGCGGAGGAGGGCTGCCCGCTTCTGATTCATCAGCGAAGCTATTCC
ATCATTAATCGTTGGGTGGAGGAACCGGGCGATGACGGTGAGAACTTGTTGCAGTCAGCT
GCCAACAATGGTCTTGGCGTCATTGCTTTCTCACCACTTGCGCAGGGCCTGCTCACGGAC
AAATATCTCGATGGAATTCCAGAGGGTTCCCGCGCCAGCCAGGGTAAGTCCCTKTSTKAC
GGSWTGTTGAACGTGAACAATATTGATWTGGTCCCMARSYTNAWKRSAWTTTCCMARRAM
ACCGGGCAGTCCTTTNNCCNAAAGGNCTTTTGTTGGGTTGTTGCCCAACCAAGGAAAGTA
CGGCGCCGGATTACCGTGACCAGTGCATTGATTGGTGCTTCGTCAGTTGAGCAGCTGGAC
AACAGCCTTGATTCACTCAACAACTTGGAGTTTTCTGACGCCGAGTTGGAGGCGATCGAT
GAGATTTCCCACGACGCCGGCATCAACATTTGGGCGAAGGCCACCGATTCCAAAACCCGC
GAAAAC
>RXA01395-downstream
TAACCCATCAACATCAGTTTGAT
>RXA01411
TTCATTGCGCAGGTAATGCTTGGAATGGGGGCGGTTACCGCTAACTGCGTTACCTCAGTA
ATGATGGCCGAGGTCTTCCAAGAGGTCACGCGCGGTACTTCCGGCGGCATTACCTACAAC
GTCACTTACGCAATCTTCGGCGGCTCGGCTCCATTTATCTCCACCGCATTGGTCTCCTGG
ACCGGGAGCCCGCTGGCCCCTGCGGTATAGATGATCATCATTGGGCTCTTCGCCTTCACC
GCGTCGCGCTTCATTCCTGAAACCTCCCCAGTTTTTGTCAGCGCAACCCCGGCCATTAAG
GCACCAAAGGTGCTGGTCAACGCGGGT
>RXA01411-downstream
TAAACCACGGTTTTCGACGAAAA
>RXA01454-upstream
GGCCAGGACTTTGGCGTTTCGGATCAGCAGTTCGGCTTGGATTATGGATTCTACGCGTTT
GATCTTCCGATGCTTCGCCTCATCGCTTGACTCACTGTCG
>RXA01454
ATGATGTTGATCGTTGCTTTCGTGATCGCAGTGGTTGGCCATTACCTCATGGGTGGCATT
GGCGCTGGAAACCAGATGACGGGCCAGAAGTCCTTTGTATCCCGTGGTGCGCGCACTCAG
CTTGCGGTAACTGCTGGTCTGTGGATGCTTGTTAAGGTCGCTGGCTACTGGCTGGATCGC
TATGACCTGCTGACTAAGGAAAACTCAACCTTCACAGGTGCAAGCTACACCGACATCAAT
GCACAGCTGCCAGCGAAGATCATCCTG
>RXA01455-upstream
AGAGTGGGGGAGAAACGCATAATCACGTACATATAAGGATATTGTGTTGTCGACTGGTCT
CACACCTCGTCCCCAACCGATCAAGCGACCTCCCAAGGGG
>RXA01455
GTGACATGGATCTTCGCGATTATCGCGTTGGTCATTCTCATCGGCGCAATGAGTGTTGGC
TTCTATACGGACTGGCTTTGGTTCGGTGAAGTCGATTTCCGAGGCGTTTTCAGCAAGGTT
ATTGTCACTCGCATTGTTCTCTTTGTGATCTTTGCGCTAATTGCTGGGTTTGTCACATGG
CTTGCTGGTTATTTTGTGACAAAACTTCGACCTGATGAGATGTCGGCGTTTGATACCCAG
TCGCCTGTGTATCAGTACCGTGAGATGATCGAAAACAGCCTTCGTGGCGTTATGGTGATC
ATTCCAATTTTCGTCGCGTTGCTGGCTGGCCTAATTGGTCAGCGTTCGTGGCGCACCGTT
CAAATGTGGCTGAATGGCCAGGACTTTGGCGTTTCGGATCAGCAGTTCGGCTTGGATTAT
GGATTCTACGCGTTTGATCTTCCGATGCTTCGCCTCATCGCT
>RXA01455-downstream
TGACTCACTGTCGATGATGTTGA
>RXA01625-upstream
GGGAGCGAAGTTCCCTGGGTTAAATTAACCACTTGCAGTATACCCTAGTGGGGTATATTG
TCTGCTGTTAGAAGATACCCGACAGAAAGGGGCCAATAAT
>RXA01625
ATGGCTATCAAGAACTACAGCGTCGAAGGCATGACTTGTGGACACTGCGTCTCCTCCGTA
AAGGAAGAGGTCGGAGAGGTTGCTGGCGTCACCGCTGTGGACGTCACCCTAGAAACCGGT
GCCGTGCAGGTTACCGGCGAAGACTTCACCGACGAGGCTGTCAAGGCTGCTGTCGTTGAG
GCTGGCTACAAGGTTGTTGCA
>RXA01625-downstream
TAAACCCCTGAAAAGTTTAAAGC
>RXA01756-upstream
GCTTCAAACAGGATTTAATCTAAAATCTTAAACCTCGTATTTTCCCTGATAGGCTCAGAT
GCGCCTGAAATCGGGCTTGTTGAGGGGAGAGGTGTGTGAC
>RXA01756
ATGAAAGAGTTGGAACTGGGCGAGGCGAGGGACGTCGCTGCAACGTTGGAAGCGATGCCG
ATCCAGGAGGTTATTGATCAGGTTGAGCGAACTTCTATAACTAAAGGTGCGGTACTGCTG
CGTCTGCTGAGTAAAGATCGATGGTTGTTGGTCTTCGATGCTCTTGGTCCGCGACTCCAG
GCTGATCTCATTGGTGCTTTTCAGGATGCGGAAGTGCTGGATTATTTCGCTGACCTTGAC
CCTGATGACCGCGTTTGACTGCTTGATGAGCTGCCGGCGTGGATCGCTGACGAGTTGCTT
CGCAGTCTCGATCCGCAGGAAAAGCAGGTCACGGAGCTGGTCTTGGGTTACGCAAAGGGG
TCGGTTGGACGTTGGATGTCGCCCCAGGTTTTATTGCTTTTCGACGACATGTCCGTCGCC
GAAGTCTTAGATTTTGTGCGCAATCATGCTGCTGAGGCTGAGACGATTTATGCCTTACCT
ATTGTGAACCGTGCTCGCCAAGTGATGGGCGTGGTGTCGTTGCGAAAGCTGTTCATCGCA
GATCCCACTCTAAAAGTCTCGGAAATCATGGTGCGTCCTGTTTCGGTGTTGGCGTCCGCG
GATATTGAAGAAACGGCCCGCTGGTTCCTACAGTTGGACCTCGTTGCGATGCCCGTTGTG
GATGAATCGAACATGCTCTTAGGAGTGCTGACCTTCGATGATGCGCAAGACATCGTGGAG
CAAGCCGACTCTGAGGAGTCCGCTCGCAGTGGTGGTTCGGAACCTGTCCAGCAGCCGTAT
CTATCCACGCCGATTCGGAAACTGGTGAAGTCCCGCATCGTATGGCTTCTGGTTTTGGCA
GTGTCAGCAATTTTGACGGTTCAAGTTCTTGATATTTTCGAAGCCACCTTGGTTGAAGCC
GTGGTACTGGCATTGTTCATTCCTTTGCTCACTGGTACTGGCGGAAACACCGGAAACCAA
GCTGCAACAACCGTGACCCGTGCGCTCGCATTGGGTGACGTCCGAAAATCAGATGTCTTC
CGCGTCTTGGGCAGAGAAATCCGAGTCGGCCTCATGCTCGGGGCATTGTTGGGTGCCGTT
GGATTTGTGATCGCATCGCTTGTTTACGGCATGCCCGTAGGCACTGTCATCGGTCTGACA
TTGTTGGGGGTGTGCACGATGGCCGCATCAGTTGGCGGAGTAATGCCAATTATTGCCAAG
GCGATCGGAGCGGACCCAGCGGTGTTCTCTAATCCTTTTATTTCAACCTTCTGTGATGCA
ACAGGTTTGATCATCTACTTTGCAATTGCCAAGTTGGTGCTCGGAATC
>RXA01756-downstream
TAAAAGATTTTTGCTTTTCGACG
>RXA01808
ATGCGCGGGGGTGCACCAGCGCGAACCTCAAAGCCTGGATTCCGGCTTGAAGCCGCGGAA
GCTTTGATCGCAGAAGTGCCAGCGCCACGCGACAAAGTCGAGCTGATGGCATTTTCCAAG
TCCAGGGAAGGCCGCGTTGTCATTGAACTTGAAGACGCCACAGTAGCCACCCCTGATGAT
CGCATCCTGGTAGAAGACCTCACCTGGCGTTTGGCTCCAGGAGAGCGCATCGGTCTTGTC
GGCGTCAACGGCTCCGGCAAAACCAGGCTGCTGCGGACCCTTGCGGGCGAGCAGCCACTT
CAGGCAGGCAAACGCATCGAAGGCCAAACCGTCAAACTGGGATGGCTCGGCCAGGAACTC
GATGACCTAGAGCTCAGCCGCCGACTCATCGACTGCGTTGAAGATGTCGCTTCCTACGTG
ATGATGGGGGACAAGCAGGTCTCCGGTTCCCAATTGGGAGAACGGGTCGGATTCTCACCC
AAGAGGCAACGCACCCCAGTTGGTGACCTGTCCGGTGGTGAACGCCGCCGACTCCAACTC
ACCCGCGTGCTCATGGCCGAACCAAACGTGCTGCTCCTCGACGAGCCCACCAACGACCTG
GACATTGACACCCTCCAAGAGCTGGAATCCCTTGTCGACGGATGGCCAGGCACCATGGTG
GTTATCTCCCACGACCGTTACCTCATCGAACGCGTCACCGAGTCCACCTGGGCACTCTTC
GGCGATGGCAAGCTCACCAAGCTGCCAGGCGGAATTGAAGAGTACCTGCAGCGACGAGCA
GCGATGGCCGCGGCCGAAGACAGTGGAGTGCTGAACTTGGGTGCGGCCACGCAGGCTGGA
ACCTTTTCTGCTGCAACAGAGCAGGCTGCCACTTCTGTGGAAAGTTCCGGAATTTCTTCC
CAAGAACGCCACCGCATCACCAAGGAAATGAACGCCCTGGAGCGCAAAATGGGCAAGCTT
GACCAGCAAATGGACAAGCTTAATCAGCAGCTCGCTGATGCAGCGGAGGCCATGGACACC
ATAAAGCTCACCGAGCTGGACACCAAGCTCCGCGCAGTGCAGGAAGAACACGGCGAGCTG
GAAATGCAGTGGCTGGAACTCGGCGAGGAAATCGAGGGC
>RXA01808-downstream
TAGTTCATGCCGTCGGCAGGCGA
>RXA01822
ATGGCCAGACAAAATAGCAATACCGGCGGGTTGCGTCTGGTGTTGGTTGGTATCGGAAGA
GGTGCATTTTTGGGTGCTGCTCGTGATTTCTTCATGGTGCGCGCAGATATTACGGGTGCT
TCGACGGTACAGCTGTGGTCTGCCGGTTCGTTGAGCGGGCGCGACTGGAATCATGCCCTG
TTGGTGTTGATTTCGTGTGCAGTGATTGTGCGAGCACTGTGCATTATTGTCCGCCGTTTA
CGCCTGATGGAAATGGGTGATGATGCAGCTGGGGCACTTGGAATTTCAGTGGAGAGAACA
CGGTTGATAGCCATTTTGTTGGCTGTGCTGCTGGTGGGGATCGCCACCGCAGCTGCAGGT
CCCATCGCTTTTATTGCACTGGCAGCACCTCAGATTGCCCGGGCTCTGGCCCGGGAGGAT
GGAGTGCTGGTGGCTGCGTCGATAAGCATTGGCTCTGGGCTGTTAGTTGCGGCGGATTGC
CTAGAGCAACACGTTGATACTGAGCTGCACACGCCCGTTGGCCTGGTGACCAGTTTGCTG
GGCGGGGTGTATTTGATGTGGCTTTTGAGCCGAAAGGAGGCA
>RXA01822-downstream
TAAATGCTGCAAGCGCATGATCT
>RXA01890-upstream
GCTGAGGTTGAGACCAAGCTGAACACCATCTACACCCGCGACATCGAACCACTTATTTAA
TCCGAGCACTTCAGCTACAGCTATTTAAGGAGGCTGTGAC
>RXA01890
ATGGCGTCAATCGTCTTTGAAAACGTCACACGCAAATACTCTCCGGGCGCACGCCCGGCC
GTCGAGAAGCTTAATTTGGAAATCGCGGACGGCGAGTTGCTAGTTCTCGTTGGACCCTCA
GGCTGTGGAAAGTCCACTTCTTTGCGCATGCTGGCTGGTCTTGAGCCTATCGACGAGGGA
CGTCTACTCATTGATGGTAAAGACGGCACGGAACTGCGTCCGCAGGATCGTGACATCGCT
ATGGTCTTCCAGAGCTACGCGCTGTACCCGAATATGACTGTTCGGGACAACATGGGCTTT
GCGCTGAAGAATCAGAAGGTGGCTAAGGCTGAGATCGAAAAGCGTGTTGCTGAAGCCTCA
CGCATTCTGCAGCTGGATCCGTATCTTGATCGTAAGCCTGCAGCTTTGTCTGGTGGTCAG
CGCCAGCGCGTGGCCATGGGCCGTGCAATTGTGCGTGAGCCATCGGTGTTCTGCATGGAT
GAGCCACTGTCCAACCTAGATGCGAAGCTGCGTGTGTCTACGCGTGCGGAGATCTCTGGT
TTGCAGCGTCGCATGGGCGTGACCACGGTGTATGTGACTCACGATCAGGTCGAGGCCATG
ACCATGGGTGATCGCGTCGCTGTGCTTTTGCTCGGTGTGCTGCAGCAAGTAGACACCCCG
CAGAACCTGTACGACTACCCAGCAAATGCGTTCGTCGCCAGCTTCATTGGTTCCCTTCCA
>RXA01890-downstream
TGAACTTGATTGAGGGCACCATC
>RXA01900-upstream
AAAGGTGACACGCCTTAGATTCTTGTGGTCTGACCATGAGGTTGGGCCAATCGGTTTCAG
CCCGTTTACTCGCGCCGTCCGTTTCAGAGAAGAGGTCACC
>RXA01900
ATGACAACCGCAGTAGATCAAAACTCACCGCGCAAGCAGCAACTCAACAAGCGCGTCCTG
CTGGGCAGCTTGAGTGGCAGCGTTATGGAATGGTTGGACTTCCTGGTTTACGGAACCGTC
GCCGCGCTGGTCTTCAACAAGATGTACTTCCCCAGCGGCAACGAGTTCCTCTCCACAATC
CTGGCGTACGCATCCTTCTCCCTGACCTTCTTGTTCCGCGCCATTGGTGGCGTCATCTTC
GCCCACATCGGCGACCGCATTGGGCGTAAGAAGACCCTGTTCATCACCTTGATGCTCATG
GGTGGCGGCACCGTGGCGATTGGTTTGCTGCCCGACTACAACGCCATCGGCATTTGGGCA
GCAATCCTTCTGATGTTCCTCCGCATTTTGCAGGGCATCGGAATTGGCGGCGAATGGGGT
GGCGCACTGCTCCTGGCATACGAATACGCTCCAAAGAAGCAGCGTGGGCTCTACGGCGCA
GTTCCTCAAATGGGCATTTCCCTGGGCATGCTGCTTGCAGCTGGCGTGATCTCTCTGCTC
ACCCTCATGCGGGAAGATCAGTTCCTCACCTGGGGCTGGCGCATCCGATTCGTCGGATCC
ATCCTCCTAGTGTTCATCGGCCTGTTCATCCGAAACGGCCTTGATGAAACCCCCGAGTTC
AAGCGTATCCGCGATTCCGGCCAGCAGGTAAAGATGCGTCTGAAGGAAGTTCTGACCAAG
TACTGGCCAGCCGTTCTGGTCTCCATCGGCGCAAAAGCTGCCGAGACGGGCCCCTTCTAC
ATCTTCGGCACCTACATCGTTGCTTACGCAACCAACTTGCTGAACATCCGCGACAACATT
GTCCTTCTGGCAGTTGCTTGCGCCGCCCTCGTTGCCACCATCTGGATGCCACTGTTCGGA
TCCTTCTCCGAGCGCGTCAACGGTGCAGTGGTGTACAGGATCTGTGCATCCGCAACCATC
GTGCTGATTGTCCCTTACTACTTGGTCCTCAACACCGGCGAAATTTGGGCACTGTTTATC
ACTACCGTGATTGGCTTCGGCATCCTCTGGGGTAGCGTCAACGCAATCCTCGGAACCGTC
ATCGGAGAAAACTTCGCACCTGAGGTCCGCTACACGGGCGCTACCCTGGGTTAGCAAGTC
GGAGCAGCACTCTTCGGCGGTACCGCACCCATTATCGCAGCATGGCTGTTCGAAATCTCC
GGCGGACAATGGTGGCCAATCGCCGTCTACGTCGCTGCATGTTGCCTTGTCTCTGTGATC
GCCTCGTTCTTCATCCAACGCGTCGCGCACCAAGAGAAC
>RXA01900-downstream
TAAAATCTAAGTAAAACCCCTCC
>RXA01939
TCTACAAGCGGCACCGATCTTACGTCCTTGAGCCACAAGGAAATCTTCCAAATGCGACGC
AAACTGCAGGTGGTGTTCCAGAACCCCTACGGCTCGCTTGATCCGATGTACTCCATCTAC
CGGTGTATTGAGGAACCGCTGACCATCCACAAGGTTGGTGGAGACCGCAAGGCACGCGAA
GCTCGCGTCGTTGAACTTCTCGATATGGTGTCCATGCCCAGGTCCACCATGCGCCGCTAC
CCCAACCAGCTTTCCGGTGGCCAACGTCAGCGCATCGCCATCGCCCGTGCATTGGCACTG
AATCCAGAAGTGATCGTGTTGGATGAAGCGGTTTCCGCTTTGGACGTGTTGGTTCAGAAC
CAGATCCTCACCCTGCTTGCAGAACTTCAGCAGGAACTGAAGCTCACCTATTTGTTCATC
ACCCACGACTTGGCCGTTGTTCGACAAACCGCCGACGATGTTGTGGTGATGCAAAAGGGA
CGAATCGTTGAAAAGGGTCGTACCGACGACATCTTCAACGATCCTCAGCAGCACTACACC
CGCGATTTGATCAATGCGGTACCTGGTCTGGGAATCGAGTTGGGTACTGGAGAAAACCTG
GTT
>RXA01939-downstream
TAACCCGCACAGCCTCACTAAAC
>RXA01972-upstream
ACGCGTTGCTGGATATCACCCTGGCCGTCGATGACAACGCCGAATGCATCGACGCCGGAT
GCGCCGTACCTGGGTGTGTCACTGGACAGGAGAGTGCGTA
>RXA01972
GTGGCAACCGGTCTACTGTCGGCGATTGGTCTGTTTATCGCCACCAATATCGACGACATC
ATCGTGCTCTCGCTGTTTTTTGCCCGCGGGGCGGGGCAAAAAGGGACCACGCTTCGGATT
CTGGCTGGTCAGTACCTCGGCTTCATGGGCATCCTCGCGGCCGCAGTCCTGGTCACGGTG
GGGGCAGGAGCATTCCTACCTGCTGAGGCGATCCCGTACTTCGGACTAATTCCCCTGGCC
CTGGGACTATGGGCGGCCTGGCAGGCCTGGCGAAGCGATGATGACGACGATGATGATGCG
GAGATCGCCGGGAAAAAGGTGGGTGTGCTGACCGTCGCCGGTGTGACGTTTGCCAACGGT
GGCGACAATATCGGCGTCTACGTCCCGGTCTTCCTCAACGTGGACACTGCCGCCGTCATC
ATCTACTGCATCGTTTTCCTCGTCCTGGTGGCAGGCCTGGTCCTGCTGGCAAAGTTCGTG
GCCACCCGCCCGCCCATCGCAGAAGTCCTTGAGCGCTGGGAGCACGTGCTGTTCCCGATC
GTCCTGATCGGCCTGGGCATCTTCATCCTCGTCAGCGGCGGCGCGTTCGGCCTC
>RXA01972-downstream
TAATAAGCCCATCCCGAGGGCCC
>RXA01986-upstream
GCCACGATTAAAGACATTGGTGATGTGAATCACTGGGTACTACATCGTGTTTCGTGACGC
TGCACCTCCAAGTAAGGGCACGACAAACTTAGGAGAGAAG
>RXA01986
ATGGCTAGTACCTTCATTCAGGCCGACAGCCCTGAAAAAAGTAAGAAGCTGCCCCCACTC
ACAGAAGGTCCGTATAGAAAGCGGCTATTCTACGTTGCACTAGTTGCGACGTTTGGTGGG
GTGCTCTTCGGATATGACACCGGAGTAATCAACGGTGCACTCAACCGAATGACACGTGAG
CTCGGACTAACCGCGTTCACCGAGGGTGTTGTAACTTCTTCCCTGCTGTTTGGTGCAGCA
GCTGGTGCGATGTTTTTCGGTGGCATTTCCGACAACTGGGGTCGCCGGAAAACAATCATC
TCACTTGCAGTAGCTTTCTTTGTCGGCACCATGATGTGCGTGTTTGCTCCATCTTTTGGA
GTAATGGTTGTCGGACGTGTGCTTCTTGGACTCGCAGTTGGTGGCGCTTCCACTGTTGTC
CCTGTCTACCTGGCTGAACTTGCTCCTTTTGAAATCCGTGGCTCAGTGGCTGGCCGTAAT
GAGTTGATGATTGTTGTTGGTCAGCTCGCAGCTTTTGTCATCAATGCGATTATTGGAAAT
GTTTTTGGACACCACGATGGTGTGTGGCGCTAGATGCTGGCAATTGGCGCAATCCCAGCA
ATTGCCCTCTTCTTTGGA
>RXA01995-upstream
CCGACGGAAAGGCATGCGCCTGCGTGTCTCGAGTAGTCTCCTCCCCTTCCTCGTCCCCAA
CCTCGACCATTACGGTCGCCGTCTCCTAAAGGAGGCTGGC
>RXA01995
ATGGATATCCGCCAAACAATTAACGACACAGCAATGTCGAGATATCAGTGGTTCATTGTA
TTTATCGCAGTGCTGCTCAACGCACTGGACGGCTTTGATGTCCTCGCCATGTCTTTTACT
GCGAATGCAGTGACCGAAGAATTTGGACTGAGTGGCAGCCAGCTTGGTGTGCTGCTGAGT
TCCGCGCTGTTCGGCATGACCGGTGGATCTTTGCTGTTCGGTCCGATCGGTGACCGTTTC
GGCCGTAAGAATGCCCTGATGATCGCGCTGCTGTTCAACGTGGTGGGATTGGTATTGTCC
GCCACCGCGCAGTCCGCAGGGCAGTTGGGCGTGTGGCGTTTGATCACTGGTATCGGCATC
GGCGGAATCCTCGCCTGCATCACAGTGGTGATCAGTGAGTTCTCCAACAACAAAAACCGC
GGCATGGCCATGTCCATCTACGCTGCTGGTTACGGCATCGGCGCGTCCTTGGGCGGTTTC
GGCGCAGCGCAGCTCATCCCAACATTTGGATGGCGCTCCGTGTTCGCAGCCGGTGCGATC
GCAACTGGTATCGCCACCATCGCTACTTTCTTCTTCCTGCCAGAATCCGTTGATTGGCTG
AGCACTGGCCGCCCTGCGGGCGCTCGCGACAAGATCAATTACATTGCGCGCCGC
>RXA02033-upstream
TGATCTGCTGTATCAGGTGGTTGATCCAAGAGTCGGTGCTGTTGGGGTTGCTAGCACTAA
GGTTCCAGGGAGCGTGGCTTAAGTGACAACGATCAAAAAC
>RXA02033
ATGCCCCTTTCAGGGAAAATCGGCGGCTTCATCGTTGGCGTTGTATTTGTTCTTGCTGCG
CTGTCTTTCATTTGGACTCCGTTTGATCCAGTTCAAGCTTTCCCACAGGAGCGCCTTGAG
GGAAGTTCTTTGAGGCACCTGTTGGGAACGGATCGTTATGGTCGCGATGTTTTATCCCAG
ATCATGGTTGGTTCCCGCGTCACGTTGTTGGTGGGCATGATTGCGGTGGCGATCGCAGCA
TTAATCGGCACGCCACTGGGTATTGCTGCGGGAATGCGCCGTGGCATGGTGGAAACCTTT
GTCATGCGTGGTGCCGATTTAATGTTGGCGTTCCCAGCACTGTTGTTGGCGATTATTTCC
GGCGCCGTTTTCGGCGCCTCCACGTGGTCCGCGATGGTCGCGATCGGCATCGCAGGCATC
CCTAGTTTTGCCCGCGTGGCTCGTGCAGGCACATTGCAGGTGACCAGTCAGGATTTCATC
GCAGCTGCTCGGCTATCAAAAGTAAGTTCCGCCCGGATCGCGCTTCGCCATATTTTGCCC
AACATCACCAGCATGTTGATCGTTCAGGCATCAGTAGCTTTTGCCCTGGCGATCCTGGCG
GAAGCCGCATTGAGTTTCCTCGGTTTGGGCACGACTCCCCCGGATCCCAGCTGGGGTCGC
ATGTTGCAAACCGCTCAAGCATCCATCGGCGTCACCCCCATGTTGGCGGTGTGGCCCGGT
GCTGCGATCGCTTTGACGGTCCTTGGTTTTAATCTTTTCGGTGATGGTTTACGCGATGCC
ATCGATCCA
>RXA02033-downstream
TAGTATTATAT
>RXA02034-upstream
TCGTGGTGATGTCACCAGAGATCACCGGCATTGATCCCAACGTGGTGTCCGGGGCGTTGG
AATTGTCGTTGATTGGTCGGAAAGAATCCGGGGTAGCGCA
>RXA02034
GTGAGTAAAACAATCGCTTGGACTGTGCTGCGGTACACCCTGACTTTTGTGATGGCCAGC
ATCATCATTTTTGTGCTGATTCGAGTCATCCGCGGTGACCCCGCCGCTGTTGCCCTGGGA
ATTACCGCGACACCAGAAGGAATCGCTGCGTTGCAATCACAATTAGGTACTGATCAACGG
CTTTTCCAACAGTACTTTTCCTGGATAGGTGGAATGCTCACTGGCGATTTCGGCACCTCG
CTGAGCTCTGGCCAAGACCTTTCCCCGATCATTTTTGACCGCTTACAAGTGAGCCTCATT
TTGGTGGGATGCTCCATTGTGTTGTCGTTGCTCATTGCCATTGCACTTGGTGTGCTTTGG
GCCCGGCGCGGTGGCGTGATCATTTCCGGCATCAGCCAGATTGGCATTGCGATCCCTAGT
TTGCTCGCCGGTATTTTGTTGGTCGCTGTCTTCGCGGTTGGTTTGGGGTGGCTGCCCGGC
AATGGCTGGATTCCGCCGTCGGAAAACTTTGGAGGTTTCTTAGCCAGGCTGATCCTCCCG
GTTCTGGCTCTTACTGCTGTTCAAGCAGCAATTTTGACCCGCTATGTCCGCTCTGCAGTA
ATGGATGTAATGGGGCAAGATTTCATGCGCAGCGCGAGGTCGAAAGGTATGAGCTTCAAC
CGCGCGTTGATCATCCACGGTCTTCGGAATGCTGCTCTTCCTGTCCTTACCGTCACTGGT
TTGCAGCTAACAACCTTGGTTATCGGCGCCGTGGTGATTGAACAAGTCTTTGTCATCCCC
GGAATCGGTTCGATGCTGCTGGAGTCCGTGTCCAACCGTGATCTCATCGCTGTGCAATCT
ATTGTCATGCTGCTGGTGGCGTTCACGTTGCTGGTTAATTTGGTGGTTGATCTGCTGTAT
CAGGTGGTTGATCCAAGAGTCGGTGCTGTTGGGGTTCCTAGCACTAAGGTTCCAGGGAGC
GTGGCT
>RXA02034-downstream
TAAGTGACAACGATCAAAAACAT
>RXA02035-upstream
GGATTTTCCATTGGCGGAGGTTCATGCGGCGGGTATCCATTGCCTTCCATTTTAGTTTTC
CATTTACTTTCCCGCATCACACCGACTAATCTCAGAAGCC
>RXA02035
ATGAAGATCACGCGCGGACTCCTGCCATCATTGCTGTTGGCAAGCACAATCGTGGTGTCG
TCATGCTCTGCTGGATCGACTGCGTATCAGCAGCCCCCTGCTGTTGATCAATCATCCATT
GTCATTGCTACCACGGCTGCTGCGGCGTCACTTGATTTCACCAATGCTGCGGGCGCTGCT
ATTCCGCAGGCGATGATGTCCAATATTTACGAGGGGCTTGTGCGCATCGATGCGGAGGGT
GAGATTCAGCCGCTGCTTGCCACGTCGTGGGATATTTCACACGATCGCACCCAGTACATT
TTCCATTTGCGGGAGGGTGTGCTGTTTTCCAACGGCGATCCCTTCAATGCTGATTCTGCG
AAGTTTTCCATTGATCGGGTAAAAACTGACTGGACCAATGGTTTGAAAAGTGGCATGGAT
GTGGTGGAGTCCACCGAGGTGATTGACGATCACACGCTGAAAGTTTCGCTGGTCAGGCCG
TCCAAGCAATGGTTGTGGAGCATGGGTACCGCGATGGGTGCCATGATGACGGAGGGGGGC
GTCGATAAGCTGGCAACTGATCCCGTTGGCACCGGCCCGTACACGGTGACGCACTGGGCG
CCGGGGCGCGCAATTGGGTTCGGCGCGCGGGCCGATTATTGGGGGCAGAAGCCGCTTAAC
GACGCCGCAACCATCCGCTACTTCAGCGATGCGACGGCCTCGACCAATGCGCTGCAAAGC
GGTGACGTGGACGTGATTTCGGCGATGCAAGCGCCCGAACAGCTGGCTACGCTCCAGCAA
TACACCGTGGAAGTGGGCACAACCAATGGTGAGATGTTGGTGTCGATGAATAATCAGCGT
GCACCTTTTGATGATGTGCGTGTGCGCCAGGCGGTGATGTTTGCGATTGATCGCCAAGCC
GTCATTGATACCGCGTTGGAAGGTTACGGCACCGACACTGGTGGCGTGCCTGTTCCGCCG
ACTGATCCGTGGTACGAGAAATCCACGATGTACCCCTACGATCCGGACCGCGCACGGGCA
TTGTTAGAGGACGCCGGCGCCGAGGGAACGCGGATCACCATGTCCATTCCTTCGTTGCCG
TACGCTCAGGCAGCCTCTGAAATCCTGTACTCGCAACTGCGAGATGTTGGTTTTGATCCT
GTGATTGAATCAACCGAGTTCCCAGCCGTCTGGTTGGCACAGGTCATGGGGCAAAAAGAC
TACGACATGTCACTAATCGCGCATGTGGAACCCCGCGACATCCCCACGCTGTTTAGCCCC
AACTACTATTTGGGCTTTGACGACACCGAAACCCAAGCCCTCCTCGCAGAGGCAGACAGT
TCAGCAAACGAAGTGGAATTGATGCAACAAGCTGTCGATCGAATCATGGAACAAGCCGTC
GCCGACAACCTCATGAACGTGGCCAACATCGTGGTGATCTCACCAGAGATCACCGGCATT
GATCCGAACGTGGTGTCCGGGGCGTTGGAATTGTCGTTGATTGGTCGGAAAGAATCCGGG
GTAGCGCAG
>RXA02035-downstream
TGAGTAAAACAATCGCTTGGACT
>RXA02062-upstream
TTGTCTAAACATCGTTTTGGGGTCCGAATGATAGCCCCTTTTAATGCCCCCATTTCGGTA
TCGCTGCGCAACTGTTTTTAGATGGCTAATCTTTGAAATT
>RXA02062
ATGAGAGTCGGAATGATGACAAGAGAGTATCCACCAGAGGTTTACGGCGGCGCTGGCGTG
CACGTCAGCGAATTGACCCGATTCATGCGTGAGATCGCTGAAGTTGATGTTCACTGCATG
GGTGCACCTCGCGATATGGAGGGAGTTTTCGTCCACGGCGTCGATCCTGCCTTGGAAAGC
GCGAACCGTGCGATTAAGACACTGTCCACCGGTTTACGCATGGCAGAAGCTGCAAACAAC
GTGGATGTCGTGCACTCACACACTTGGTATGCAGGTCTTGGCGGCCACCTTGCAGCTCGT
CTCCACGGCATTCCTCACGTGGCTACCGCGCACTCTTTGGAGCCAGATCGCCCATGGAAG
CGTGAGCAGCTTGGCGGTGGATACGACGTGTCCTCCTGGTCTGAAAAAAATGCCATGGAA
TACGCTGACGCGGTCATCGCTGTGTCGGCTCGCATGAAAGATTCCATCCTCGCTGCGTAC
CCTCGCATCGAGCCGGACAACGTGCGTGTTGTCCTCAACGGCATCGACACTGAGTTGTGG
CACCCTCGCCCGACTTTCGATGACGCGGAAGATTCCGTACTCCGCTCCCTAGGCGTTGAC
CCACAGCGGCCCATCGTCGCATTTGTCGGCCGCATCACCCGCCAAAAAGGCGTCGAGCAC
CTCATCAAGGCAGCAGCGCTTTTCGACGAGTCCGTGCAGCTTGTGCTCTGTGCCGGCGCG
CCAGACACCCCCGAAATCGCAGCTCGCACCACCGCCCTGGTGGAAGAACTCCAGGCAAAG
CGCGAAGGCATTTTGTGGGTTCAGGACATGCTGGGCAAGGACAAAATCCAAGAGATTCTC
ACCGCTGCTGACACCTTCGTGTGCCCATCCATTTACGAGCCACTGGGCATCGTGAACTTG
GAAGCAATGGCCTGCAACACCGCAGTTGTCGCATCCGACGTTGGAGGCATCCCTGAGGTT
GTTGTCGAGGGCACCACCGGCGCCCTCGTTCACTACGACGAAAATGATGTCGAAACCTTC
GAGCGCGATATCGCCGAAGCGGTGAATAAAATGGTCGCTGATCGAGAGACCGCAGCCAAA
TTTGGTCTCGCAGGGCGCGAACGTGCTATGAATGATTTCTGCTGGGCAACGATTGCTCAG
CAGACCATTGATGTGTACAAATCCTTGATG
>RXA02062-downstream
TAAAACCGAAAGCCGGGGAACCT
>RXA02068
ATTTTTGTCCCCATGTTGCGTATCGCTGCCATTGAACCGAAAGACATTACTTTGGTTACC
GGTTCTGTATCACTTCGAACCTTTCGCGTGCGCACCGGTGAATTGCAGGTCATGGGCGAT
ATTGTGGGTGCAAAAGTACATACCGATGATCCAGAGCTGCAACAATTCCACGGTCGCGCG
GTAGAAATCGCCGATGTGGAGCTGGAGTTATCGCGCACTCGCGATTGGATCATCACGCGC
GTGGCGGTGCTGGGTGAGCGCGCTAAATTTGGCCGGCGCCCAGTGCTGCACACAGTGCCG
TGGAGTCATATCGACGGCATCACCGCAGGTGGTGTCGGCGAGTCCAATCACACCGCCGAA
CTCATCGCAGGGTTTGAGGATATGAGGCCTGCGGAGGTGGCAAAGCAGCTTTATCAGCTG
CCTACGGCTCAGCGTACCGAAGTGACGGAAGAGCTTGACGACGAAAAGCTGGCGGATATC
CTGCAGGAATTGTCCGAGGACCGCCAAGCCGAGTTGATTGAAGAATTAGACATCGAACGT
GGCGCGGACATTCTGGAGGAAATGGATCCAGATGATGCTGCAGACTTGTTGGGTGAGCTG
CCTGATGACAAAGCTGATGTGTTGTTGGATCTGATGGACCCTGAGGAATCTGCGCCGGTG
GGTCGTTTGATGGATTTCTCCGCGGACACCGTTGGTGCGGTGATGACTCCTGAGCGATTA
ATTATGGATCCTTCCACCACAGTCGCTGAAGCGTTGGCGATGGCCAGAAACCCCGACCTT
GCTACTTCTTTGGCATCGTTGATCTTTGTGGTGCGGCCACCGACGGCCACGCCTACTGGA
AAATACCTCGGCTGCGTGCATCTGCAGAAACTGCTTCGGGAGCCTCCATCAAGTTTGATT
GGTGGCATCGTCGACCCCGATCTGCCACCGCTCTACGCTGATGATTCTCAAGAAACCGCA
GCTCGATTCTTTGCCACCTACAACTTGGTGTGCGGCCCGGTCTTGGATGAAAACCGCCAT
CTGCTTGGTGCCGTAGCTGTCGATGACTTGCTCGACCACATGCTGCCAGAAGACTGGCGC
GACGCCGGAATCCGACCAGGAAAGGAGCACACCCATGGC
>RXA02068-downstream
TGATTTCAACCGCTCTGAATTAG
>RXA02079-upstream
CGGGGAGCCGTGCGGACGCTGCGGAACATTAATCATCGGGGAGAGTTTCATGAACCGCGG
CTCCCACTACTGCCCAAACTGCCAGAAGCGGCGCTAGCTG
>RXA02079
ATGAGCGAAGCTTTTGATGCAACCAAAGTGCGCAAAGCTGTGCTCACGGTGGCGCTGCTT
AACTTCGCTTATTTCTTTGTAGAATTCTTTATTGCATTAAGCGCAGGCTCCGTTTCTCTA
CTGGCTGACAGTGTCGATTTTCTTGAAGACACCTCGATGAACCTGCTCATTTTCATTGCC
CTAGGATGGCCGTTGGCGAGGCGCGCAGTGATGGGCAAACTTATGGCGATTGTGATTCTT
GCACCTGCTGCTTTTGGTGCGTGGGCAGCGATTCAACGGTTTTCCGCACCGCAAGCGCGC
GAAGTGTTTCCGATCATCGTCGCTTCTCTGGGGGCGGTCGTGATCAACGGCGCGAGTGCC
ATCATTATTTCTCGAGTGCGACAACATGGTGGCTCGCTTGGCCAAGCTGCCTTCCTATCC
GCCCGAAATGACGTCCTGATCAAGATTGCCATCATCATGATGGCCTTAATTACCGCATGG
ACGACGTCTGGATGGCCAGATTTGATGCTAGGTTGTTTCATCATTCTGCTCGCACTGCAC
GGCGCTCAGGAGGTGTGGGAAGTCAGTGAGGAAGAACGCCTCGCCTCCAAAGCCCTTGCT
GGGGAAGCCATCGAT
>RXA02079-downstream
TAGGGGAGCAGTATGAGCTTTTC
>RXA02096-upstream
CGCTTCGACGACCTCACCCACAGCGATATCCGCAGGAATGTCATCGCGGTTTTTGATGAG
CCGTTCTTGTAGTGCTCCTCCATACCGCGAGAACATCTCG
>RXA02096
ATGGGTTTGGATGTCAGTGATGAGCAGATCGAACACGCAGCCAGGCTTGCCCAGGCTCAT
GATTTTATCGATCGCCTTCCAAACAAATACGAGGAAGTCATTGGCGAACGCGGCCTGACG
CTTTCTGGTGGTCAACGCCAACGCATCGCCCTCGCACGGGCTTTCCTGGCGCATCCCAAA
GTGTTGGTGCTTGATGATGCCACCTCTGGCATTGATGCCTCCACTGAGGACCGCATTTTC
CAGGCCTTGCGGGAAGAACTGCACGATGTCACCATTTTGATCATCGCGCACCGCCACTCC
ACTTTGGAGCTCGGCGATCGGGTTGGTCTGGTCGAAGATGGACGGGTAACAGCACTGGGA
CCGTTGAGTGAGATGCGTGATCACGCTCGTTTCTCGCATCTGATGGCTCTTGATTTCCAG
GATTCTCAGGATCCGGAATTCACCCTCGACAACGGTTCACTACCCAGCCAAGAGCAATTG
TGGCCGGAGGTCTCCACAGAAAAGCAGTACAAGATTCTTGCGCCTGCCCCTGGTCGAGGC
CGTGGCATGTCCATGCCAGCAACCCCTGAGCTGCTCGCCCAGATTGAGGCGCTGGCAGCA
GCAACGGAAGAAACACGAGTTGATGCCGGGAGGCTACGCACCAGTACCTCCGGTTTCAAA
TTGCTCAGTTTATTCAACCAGGTCCGTTGGCTCGTCGTCGCGGTCATCGCGTTGTTGCTG
GTGGGCGTAGCCGCCGATCTAGCATTTCCAACACTGATGCGCGCAGCCATCGACAACGGT
GTGCAAGCACAAAGCACCTCCACGTTGTGGTGGATCGCCATCGCAGGCAGCGTAGTAGTC
CTTCTGTCCTGGGCCGCCGCCGCGATCAACACGATTATCACGGCACGCACCGGTGAACGG
CTGCTTTACGGCTTGCGTCTGCGCTCATTTGTGCATCTATTGCGCCTGTCCATGAGCTAT
TTCGAACGCACCATGTCCGGCCGCATCATGACGCGCATGACCACCCACATCGACAACCTC
TCGTCCTTGCTCCAATCAGGTCTGGCGCAAACAGTTGTCTCTGTGGGCACGCTCATCGGT
GTGCTCACCATGCTCGCCATCACCGACGCACAACTAGCACTCGTTGCGCTGTCCGTGGTG
CCGATCATCATCCTGCTCACTCTCATTTTCCGACGCATCAGCTCCAGGCTGTACACCGCT
TCACGCGAGCAAGCCAGCCAGGTCAACGCGGTATTCCACGAGTCCATCGCCGGTTTACGC
ACCGCGCAGATGCACCGCATGGAAGACCAAGTCTTTGACAATTATGCGGGCGAAGCA
>RXA02119-upstream
TTCGGTCCGCTCTGGCAAAAATGGCTGGCTGCCACCTCGGCGCAGCAGCTTAAGGGCTGG
GCTTAAATTGCTTGTCGACGCCTAGTGCCACAATGGAGAC
>RXA02119
ATGACCGAAACACTTGTGGTGAATGGCCTAGCAGGCGGCTATGGGCACCGCACATTATTT
AACGATGTGAATCTCACCGTAGCTGCCGGCGATGTCGTGGGCGTTGTCGGCGTCAATGGC
GCTGGTAAATCCACATTTCTAAAAATTCTGCCGGGCGTGGAAAAGCCACTGGCTGGAACT
ATCGCGCTTTCGCCAGCCGATGCTTTTGTGGGCTACTTGCCACAGGAACACACCCGCACG
TCTGGAGAGACGATCGCAGTTTACATTGCTCGTCGAACCGGCTGCCAAGCTCCAACAACT
GCCATGGATGACACCGCCGAAGCGTTTGGTGCGGATCCAGACAACGCTGCCTTGGCCGAT
GCATACGCCGAGGCGCTGGATCGGTGGATGGCCAGTGGCGCAGCCGATTTGGATGAACGC
ATCCCCATCGTGCTCGCTGATTTGGGCTTTGAGCTTCCCACCTCGACGCTGATGGAAGGA
CTTTCAGGCGGGCAGGCAGCCCGCGTCGCGCTGCCGGCGTTACTGTTGTCACGTTTTGAC
ATTGTGCTTCTCGACGAGCCCACCAACGATTTGGATCTCGACGGTCTTGAGCAACTGGAG
AATTTTGTTCACGGGCTTCGCGGGGGAGTCGTACTGGTCAGCCATGATCGTGAGTTTCTT
TCCAGGTGTGTGACCACTGTGCTGGAACTCGATCTGCACCAAAATTCCCACCATGTTTAT
GGCGGTGGATATGATTCCTACCTTGAGGAACGCGCAGTGCTACGCCAGCACGCCCGTGAC
CAATATGAGGAATTTGCGGAAAAGAAGAAGGACCTTGTGGCACGTGCTCGAACGCAGCGT
GAATGGTCTAGTCACGGTGTCCGCAATGCTATTAAACGTGCACGTGACAACGACAAACTT
CGGAACAAAGCCGCTGCGGAATCCAGTGAAAAGCAGGCTCAAAAAGTCCGCCAGATGGAA
AGCCGCATCGCTCGGTTAGAAGAAGTTGAAGAGCCACGTAAAGAATGGAAACTGCAGTTC
AGCGTCGGTAAGGCGTCGCGGTCAAGTTCTGTTGTTTCCACGTTGAATGATGCAAGCTTC
ACCCAAGGCGATTTCACGTTGGGACCAGTATCCATCCAAGTAAATGCTGGCGATCGCATT
GGCATCACAGGACCCAACGGTGCTGGTAAATCCACATTGCTGCGCGGACTATTGGGAAAC
CAAGAACCCACCAGCGGTACTGCCACGATGGGCACGAGCGTGGCGATCGGAGAAATCGAT
CAGGCACGAGCGTTACTTGATCCACAGTTGCCACTGATTTCTGCGTTTGAAAAGCATGTT
GCAGACTTACCGATCAGTGAGGTGCGCACACTGCTCGCGAAATTTGGGCTGAATGATAAT
CATGTGGAAGGGGACGTCGAAAAGCTATCTCCTGGCGAGCGCACGCGCGCCGGACTTGCG
GTGCTACAGGTGCGGGGCGTCAACGTGCTTGTTCTTGATGAGCCCACCAACCACCTTGAC
CTGGAGGCCATCGAGCAATTGGAGCAAGCGTTGGCCTCGTATGATGGTGTGTTGCTGCTG
GTCACGCACGATCGTCGCATGTTGGACGCTGTGCAGACCAATCGTCGTTGGCATGTCGAG
GCTGGCGAAGTTAGGGAGCTA
>RXA02119-downstream
TAACCGTTTCCGTATTGATGCCA
>RXA02220-upstream
GGGCTTTCGCCGCGGAATGGTCCCTCGTCCAGGTCTTTAATTGATGTCTTGACGTGATCT
GGGCGGGCACGCGGCCAATCATGTGAAAGGTCTGTTTTAG
>RXA02220
GTGTCGTCCCCTCTCCCCGCTGCCGTGACATCAAAACCCGCCCACGCGCTTTCCTCTGAT
GAGGTGTTAGAAAATCTCGGGGTCCAGGACACCGGATTGACCTCCGCGGAGGCAACACAG
CGTTTGGAAGCAAACGGGCCAAACGAGGTTCCTCAAACTCCACCTGAAACAGTCTGGCAA
CGGCTATTCCGCCAGGTGAACGATCCAATGATCTACGTTCTCATTGCCGCCGCGGTACTC
ACGGCGTTTCTTGGGCATTGGACAGACACCATCGTGATCGGCGCCGTTGTCATCATCAAC
ATGATGGTTGGGTTCATCCAAGAGGGCAAAGCTGCGGATGCGTTGGCATCGATCCGCAAC
ATGCTCTCCCCGGAATCCGCGGCGTTGCGCGATGGGGTCTTCCACAAAATTGATGCGGCA
GAGCTGGTGGTCGGTGACGTTGTGAAACTATCCGCCGGCGATAAAGTGCCCGCTGACCTG
CGCATGCTCGCCGCCACCAATCTGCACATTGAGGAATCCGCGCTCACCGGCGAGGCGGAA
GCAGTGGTCAAAGGTACTGATCCAGTTGAGGCGGACGCCGGAATCGGCGACCGCACATCC
ATGGCGTTTTCAGGAACGCTGGTGCTCACAGGCAGCGGCACCGGCGTGGTCACCGCCACC
GGTGCAGGCACAGAAATCGGGCACATCACCACCATGCTTGCCGACGTCGACTCCGTGGAT
ACCCCATTGACTCGGTCGATGAAAAAGTTCTCATCGGCGTTAGCAATCGTGTGTGTATTC
CTAGCGATCCTCATGCTGGTGGTTGCCGGTCTAGTCCACCACACACCTTTGGAAGAGCTC
ATTCTTTCCGCCATCGGCTTTGCGGTGGCTGCCATTCCGGAGGGTCTACCTGCGGTTATC
GCCATCACGCTGGCATTGGGTGTGCAAAAGATGGCAGCTCGAAATGCGATTACGCGCCGG
TTGAATTCCGTGGAAACACTTGGCTCTGTCACCACCATCTGCACGGATAAAACCGGCACA
CTCACCCGCAATGAGATGACAGTCGGCGCAATCGCCACCGGTACGAGTCTTTATGACGTC
AGTGGAGCAGGCTACGAAGCTCTCGGGGAAATCCGCTTAAAAGACGGCGAGCAAGTATCC
AAGCAGGATTTCCCAGATCTCTACGGGATGGCGTTGGTGGCAGCGAACGTCAACGACGCC
GAAATTTACGAAGAAGACGGCATGTGGAGGCTTTCCGGCGAACCCACGGAGGGCGGTATT
CGTGCCTTTGCAATGAAAACCAACGCTGAAATCTTGACCCGAAGAGCCGAAGTCCCCTTC
GATTCCGCATAGAAATACATGGCGACGCTTCACACCATCGATGGAGCAAACACCATGCTG
GTCAAGGGCGCTGCCGATCGTTTATTGGATAGAAGTGCACAGCAGCGCAACGGTGAACCA
CTTGACCGGCCGTATTGGGAACAGCTGATCGAGGACCTCGCGTCCCAAGGGCTCCGCGTG
CTGGCTGCGGCATATAAAGAGCTTCCCCACAGCACGTCAACAATTACTCCAGAAGATGTT
GACCAGGGCGAACTCACCTTCCTCGGGCTCTACGGCATCATGGATCCGCCACGCGAAGAA
GTCATCGAAGCCATGAAAGTGGTGCAATCGGCAGGCGTTCGCGTCCGCATGATCACCGGC
GATCACTCCTCCACGGCCCGCGCAATCGCCCGCGAAGTGGGAATCCGCGGCCAGAACGTG
CTCACCGGTGCGGAAATTACTGCGGCTACTGATGAGGAGCTGCAGGGACTCGTCGATAAT
GCTGATCTTTTTGTGCGCACCAGCCCCGAGCACAAGCTGCGCGTCGTGCGCGCACTGCAA
GCTAACGGCGAAGTCGCGTCCATGACGGGCGACGGGGTCAACGATGGGCCAGCGCTAAAA
CAAGCCGACGTCGGCGTCGCCATGGGCATTAAGGGCACCGAAGCCACCAAAGACGCGGCC
GACATCGTGCTTGCCGACGACAATTTCGCCACAATCGCCGGCGCCGTAGAAATGGGTCGC
ACCATCTACGACAACCTGCGCAAAGCCGTCGTCTTCATGCTCCCCACCAACGGCGCCCAA
GGCCTCGTCATTTTCATCGCGATGCTGCTCGGCTGGGAACTGCCCATCACCGCACTTCAA
GTGCTGTGGATCAACCTCATCACCGCGATCACACTGTCCCTGGCGCTGTCCTTCGAGCCG
GCCGAGCCCGGCATCATGAACAGAAAAGCCAGAAACCCCAAGAGGGGGCTTATCGACGCC
CCCTCCGTGCTTCGCATGGTCTATGTCTCCCTGCTGCTCGGCGGAGCAACGTTCTGGGCT
TTCCTTGGCGCGCGCGACGCAGGAATCGACATCGACACCGCCCGCACCATCGCGGTGACC
ACCCTTGCAGTCAGCCAAGTGTTCTACCTTTTAAGCTCCCGATACTTCGAAGTATCCGCG
CTGCGAAAAGAACTGTTCACCACCAACGCGATTTCCTGGCTGTGCATCGCACTCATGCTG
ATCCTGCAAGTGGCCTTTGTCTACGTGCCGTTCATGCAAAGCACCTTCGACACCGCCGCA
CTGACGCTTAGAGATTGGGTCATGCCACTGGTGTTTGGTGTTGTTGTCTTTGCGGTCGTT
GAAACCGAGAAATTGATCAGGCGCCTTAAAGGGTCT
>RXA02220-downstream
TAAGGTTTCAGCCCCTCAAGATA
>RXA02222-upstream
CATGCGCTGAACATCGTCTGTCTACAGCGTTTGGAGAACGGGAAAAAGATGAGGCAGTAC
AAGATTGCAAAAACCTTGAAAAAGTGTATGGCAGCGATGG
>RXA02222
TTGGGTCGACCTCCCCCAGGAGACGTTCATACTCTCCTAGACGATATCGGAGCAGAGGAA
TCTGAAGCAGATAAAGTTCCAATTGAATGGCAAAACGCCCTGACTAAGGCAGACAGGTAT
GCAAACCGGCAACACATGTCTCAGGCACGACTCTATCGCCAATTAACCAGTGATGTTGGA
GAGGGCTTCACTGAAGAAGCTGCCCAATACGCAATCGAAAATGTGAACGCAGACTGGAAC
GCTAACGCCCTAGTAAAAGCAAGAAATTACCAGGAGCGCCAAGCAATGTCAGTAGACGGC
ATTTACAGGCAACTTACTAGTGAACACGGTGAAGGGTTTACCCCAGAGCAGGCACAATAC
GCGATCGACAACCTA
>RXA02222-downstream
TAAGGCATAAAGATCCTAGTATT
>RXA02312-upstream
TTAGCGCCCATTAACGCTTCACATCCTTATATTCCCAAGGAGCACGACCATTTCTGATTC
AGCAGTCCAGGAGAATCACGAACCGCACCTCAAGCGCGGT
>RXA02312
TTGAGCAATAGACACCTTCAGCTCATCGCCATCGGCGGAGCGATCGGTACGGGTCTGTTC
ATGGGGTCCGGCAAGACGATCTCCGTTGCGGGGCCATCAGTAATTTTGGTGTACGCCATT
ATTGGTTTCATGCTTTTCTTCGTCATGCGTGCCATGGGAGAGCTGCTGCTCGCCAATTTG
AATTACAAATCTTTGCGCGATGCGGTCTCTGATATTTTGGGTCCTGGCGCAGGTTTTGTC
ACCGGCTGGACATATTGGTTCTGCTGGATTGCCACAGGCATGGCGGACATCGTGGCGATC
ACTGGATACACCCAATACTGGTGGCCTGAGATCCCATTGTGGCTTCCAGGTGTGCTCACC
ATTGCGTTGCTGTTTGCCCTGAACTTGGCTGCGGTACGACTGTTGGGTGAGATGGAGTTT
TGGTTCGCCATCATCAAAATCGTGGCTATCGTGTCCTTGATCGTCGTGGGACTTTTCATG
GTGGTCACAGCCTTTGAATCACCTAATGGCACCACCGCGCAGTTCAACAACCTCATTGAG
CATGGCGGATTTTTCCCCAACGGCATCACCGGTTTCTTGGCTGGTTTCCAGATCGCTATC
TTTGCGTTCGTCGGGATTGAACTTGCCGGCACTGCAGCTGCAGAGACTGAGAATCCCAGC
AAGACGCTTCCTCGGGCAATCAACTCCATTCCCATCCGCATCGTGGTGTTCTATGTTTTG
GCGTTGGCTGTCATCATGATGGTCACCCCATGGGATCAGGTCCGTGCTGACAACAGCCCA
TTGGTGGAGATGTTCGCGCTGGGAGGAATCCCAGCGGGGGCAGGCATCATTAACTTTGTG
GTCATCACTTCTGCAGCGTCGTCTGCCAACAGTGGTATTTTCTCCACCTCGCGCATGTTG
TATGGATTGTCTTTGGAAGGCGCAGCTCCGAAACGGTGGAGCCGGTTGTCCAAGAACTTG
GTGCCAGCCAGGGGATTGACTTTTTCTGTGATTTGCCTCATTCCAGCGGTGGGTTTGCTG
TACGCTGGCGGCACTGTCATCGAGGCATTCACACTGATCACCACGGTTTCTTCGGTGTTG
TTCATGGTGGTGTGGTCCTACATTTTGGTGGCTTATATCGTCTACCGCCGCAACAGCCCG
GAATTACACAAAAAGTCGATTTTCAAAATGCCTGGCGGCGTGGTCATGGCAGTTGTGGTG
TTGGTGTTCTTCGCAGCGATGTTGGTGGTGCTGTCCCTGGAGCCGGATACCCGTGCAGCG
CTCATCGCGACGCCAGTGTGGTTCATCATTTTGGGTATCGGTTGGTTGTCCATCGGTGGA
GCTAAGGGCGCTAAGCATCGCAGCCAAATAACCTCCCAC
>RXA02312-downstream
TAAAGCTCCTGGGTTAGACTCGA
>RXA02313-upstream
CAGGATGTAACCGAAAAGATCTCAACACTTAAATAAAGTTCTCGATAAAGCCATGTTGGG
TTAACTGCGATGTAGGCATGATGTGGAGATAATAAGGCCC
>RXA02313
ATGCGGGTAGCAATTGTTGCAGAGTCGTTGCTTCCAAATGTCAACGGAGTCACGAACTCG
GTGCTCCGGGTGTTGGAGCATTTGAAAGGCAAGGGACACGACGCGCTCGTCATCGCGCCG
GGTGCCCGGGATTTTGAAGAAGAAATCGGCCACTACCTGGGCTTTGAAATTGTGCGCGTC
CCCACCGTTCGGGTCCCACTGATTGATTCACTGCCCATCGGTGTTCCTCTGCCCTCAGTT
ACCTCTGTGCTGCGCGAGTACAACCCAGACATCATTCACCTGGCATGCCCATTTGTGCTC
GGTGGAGCGGCAGCATTCGCAGCAAGGCAGCTGCGCATCCCAGCAATTGCTATCTATCAA
ACTGATGTGGCAGGGTTCTCCCAGCGCTACCACCTGGCACCGTTGGCCACTGCAAGCTGG
GAATGGATCAAGACGGTCCACAACATGTGCCAGCGGACCCTTGCTGCCTCATCGATGAGC
ATTGACGAGCTGCGTGACCACGGAATTAATGATATTTTCCACTGGGCTCGGGGCGTGGAC
TCCAAGCGTTTCCACCCTGGAAAGCGTTCCGTAGCGCTAGGTAAGTCTTGGGATCCAAGT
GGAGCAAAGAAGATCGTTGGTTTCGTTGGGCGCCTTGCATCCGAAAAGGGCGTGGAGCGC
CTTGCTGGATTATCCGGACGCTCAGACATCCAATTGGTCATCGTCGGTGATGGCCCAGAG
GCCAAGTACCTGCAGGAAATGATGCGGGATGCGATCTTCACAGGAGCTCTCGGCGGCGAG
GAACTAGCCACCACCTACGCATCACTCGATCTGTTTGTGCACCCAGGTGAGTTTGAAAGC
TTCTGCCAGGCGATCCAGGAAGCCCAAGCATCAGGTGTGCCCACCATTGGCCCACGCGCA
GGTGGTCCCATTGATTTGATCAACGAAGGCGTCAAGGGCCTGCTTCTTGATGTTGTAGAT
TTCAAGGAAACCCTCCCCGCTGCAGCCGAATGGATTTTGGACGATTCCCGCCACTCCGAA
ATGTGCGCAGCTGCTTGGGAAGGTGTGAAAGACAAGACCTGGGAAGCTTTGTGCACCCAG
CTTCTCCAGCACTACGCGGATGTAATCGCATTGTCACAGCGCATCCCACTGACATTCTTT
GGCCCTAGCGCTGAAGTAGCAAAGCTTCCACTGTGGGTTGCTCGCGCGCTGGGTGTTCGC
ACCCGCATCAGCATCGAGGCT
>RXA02313-downstream
TAACTCTGCAGAATTAATCCATG
>RXA02344-upstream
AAAGACCCGAGCCGAAGCCCTGGCCTGCGCATACTTCCTTGTCAACGCTCGCTGGGATTA
GGTCTTTTCTGAGCGCTAGCATTTCTCCACTCAAAGGAGC
>RXA02344
ATGCTTAACCGCATGAAAAGTGCGCGGCCAAAATCAGTCGCTCCAAAATCCGGACAAGCT
TTACTCACTCTCGGTGCCCTAGGTGTTGTGTTCGGCGACATCGGCACCAGCCCCCTGTAC
TCACTTCACACTGCATTCAGCATGCAGCACAACAAAGTCGAAGTCACTCAGGAAAATGTG
TACGGCATCATCTCCATGGTGTTGTGGACCATCACTTTGATCGTCACCGTCAAATACGTC
ATGCTGGTCACCCGAGCTGACAACCAAGGACAAGGTGGCATCCTGGCGCTCGTTGCTTTG
CTGAAAAACCGTGGGCACTGGGGAAAATTCGTGGCAGTAGCCGGCATGTTGGGCGCCGCA
TTGTTTTATGGCGATGTGGTGATCAGCCCGGCGATCTCTGTTCTCAGCGCAACAGAAGGC
TTGACGGTTATCTCCCCAAGCTTTGAGCGCTTCATTCTGCCCGTATCTCTCGCAGTTCTG
ATCGCTATTTTTGCAATCCAACCGCTCGGTACAGAAAAAGTCGGCAAAGCCTTCGGCGCC
ATCATGTTGCTGTGGTTTGTCACCCTTGCAGGATTGGGAATTCCGCAAATCATCGGGCAC
CCAGAAATCTTGCAGAGCTTGTCTGCACATTGGGCCCTGCGCTTGATTGTGGCTGAGCCT
TTCCAAGCATTTGTGCTG
>RXA02348
CCAATCAGAGTGGGGTGGTTTTGCGTCGTCATGCCTGCTTTAATCTTGACGTATTTGGGG
CAGGGCGCCTTGGTGATCAACCAGCCTGAAGCGGTGCGCAACCCCATGTTTTATCTCGCG
CCGGAAGGTCTGCGGATTCCGTTGGTTATTTTGGCGACCATCGCTACGGTGATCGCATCG
CAGGCCGTGATTTCTGGTGCGTATTCATTGACCAAGCAGGCCGTGAATTTGAAACTGCTG
CCACGCATGGTGATCCGGCATACCTCCCGCAAAGAGGAAGGCCAGATCTATATGCCACTG
GTTAATGGATTGCTGTTTGTATCCGTGATGGTTGTGGTGCTGGTATTCCGATCCTCTGAA
AGCCTCGCCAGCGCGTACGGACTTGCAGTGACCGGAACCTTGGTGCTGGTCAGCGTCCTG
TATCTGATCTATGTTCACACCACATGGTGGAAAACAGCGCTGTTCATTGTGCTCATCGGT
ATTCCAGAAGTACTTCTATTCGCCTCGAACACCACGAAAATTCACGACGGTGGCTGGCTT
CCACTACTTATTGCGGCCGTGCTCATCGTGGTGATGCGGACCTGGGAGTGGGGAAGTGAC
CGCGTCAATCAGGAACGCGCAGAGCTGGAACTTCCCATGGATAAGTTCTTGGAGAAACTC
GATCAGCCACACAATATTGGTCTGCGTAAAGTTGCCGAAGTGGCAGTATTTCCACATGGC
ACCAGCGATACTGTCCCGTTGTCATTGGTTCGCTGCGTGAAAGACCTCAAGCTTTTATAC
CGAGAGATCGTGATCGTTCGAATCGTCCAAGAACACGTTCCGCACGTGCCAGCAGAGGAA
CGCGCGGAAATGGAAGTGCTCCATCACGCCCCGATCAGAGTCGTGCGAGTTGATCTGCAC
CTTGGTTATTTTGATGAGCAGAACGTGCCTGAGCATCTCCATGCCATTGACCCAACATGG
GATAACGCCACCTACTTCCTGTCTGCCCTGACTCTTGGGAGCAGGTTGCCTGGAAAGATT
GCTGGCTGGCGTGATCGTTTGTATCTTTCGATGGAACGTAATCAGGCATCTCGAACTGAG
TCTTTCAAATTGCAACCAAGCAAAACCATCACGGTTGGAACAGAGCTGCACCTT
>RXA02348-downstream
TAATCAGGCAGTTGCTGGCCAAC
>RXA02353
ATGGCACTGCTGATCCTCGCCGGTCTGCAAATGATCCCGAAGGAAACCTACGAAGCAGCC
CGCGTCGATGGCGCAACCGCGTGGCAGCAATTCACCAAGATCACCCTCCCGGTGGTGCGC
GCAGCTTTGATGGTGGCAGTACTCTTCCGCACCCTCGATGCGCTACGCATGTATGACCTC
CCCGTCATCATGATCTCCAGCTCCTCCAACTCCCCCACCGCTGTTATCTCCCAGCTGGTT
GTGGAAGACATGCGCCAAAACAACTTCAACTCCGCTTCCGCCCTTTCCACACTGATCTTC
CTGCTGATCTTCTTCGTGGCGTTCATCATGATCCGATTCCTCGGCGCAGATGTTTCGGGC
CAACGCGGAATAAAGAAAAAGAAACTGGGCGGAACGAAGGATGAGAAACCCACCGCTAAG
GATGCTGTTGTAAAGGCCGATTCTGCTGTGAAGGAAGCCGCTAAGCCA
>RXA02353-downstream
TGACTAAACGAACAAAAGGACTC
>RXA02354-upstream
GAATAAAGAAAAAGAAACTGGGCGGAACCAAGGATGAGAAACCCACCGCTAAGGATGCTG
TTGTAAAGGCCGATTCTGCTGTGAAGGAAGCCGCTAAGCC
>RXA02354
ATGACTAAACGAACAAAAGGACTCATCCTCAACTACGCCGGAGTGGTGTTCATCCTCTTC
TGGGGACTAGCTCCCTTCTAGTGGATGGTTATCACCGCACTGCGCGATTCCAAGCACACC
TTTGACACCACCCCATGGCCAACGCACGTCACCTTGGATAACTTCCGGGACGCACTGGCC
ACCGACAAAGGCAACAACTTCCTCGCAGCCATTGGCAACTCACTGGTCATCAGCGTCACC
ACAACAGCGATCGCTGTTCTCGTGGGAGTGTTCACCGCCTACGCTCTAGCCCGACTGGAA
TTCCCGGGCAAAGGCATTGTCACCGGCATCATCTTGGCAGCCTCCATGTTCCCCGGCATC
GCCCTGGTCACTCCGCTGTTCCAGCTCTTCGGTGACCTCAACTGGATCGGCACCTACCAA
GCGCTGATTATCCCGAACATTTCCTTGGCGCTACCTCTGACGATCTACACGCTCGTATCC
TTCTTCAGGCAACTGCCCTGGGAACTCGAAGAATCAGCACGTGTCGACGGCGCCACACGT
GGCCAAGCGTTCCGCATGATGCTGCTTCCTCTAGCAGCGCCCGCACTATTTACCACCGCG
ATCCTCGCATTCATTGCAACGTGGAACGAATTCATGCTGGGCCGCCAACTATCCAACACC
TCCACAGAGCCAGTGACCGTTGCGATCGCAAGGTTCACCGGACCAAGCTCCTTCGAATAC
CCCTACGCCTCTGTCATGGCAGCGGGAGCTTTGGTGACCATCCCACTGATCATCATGGTT
CTCATCTTC
>RXA02394-upstream
TGTTGATGAATCAGAAGAACCTCGAGATTTGGACGAGCTAGAGGCCCAAAGCGCTATAGA
TTCTGCAAGTTCAGCGGAAGGTAGGAACTAAT
>RXA02394
ATGTTGTCGCCAGCAGCTGTAGCAGCTTTAATTCTTGTCATCGGCATTGTGGTGCTCATC
ATCGCATCAGTGCCCGTTGCCATTGCCATCGGTTTGCCATCACTTTTTGCCGCGATGGCC
GTGCTTGGCCCAGAAAACGCCGCGCAGGCCGTCGCGCAGCGCATGTTTACCGGCACAAAC
TCCTTTACACTCCTTGCCATTCCGTTCTTCGTGTTGGCGGGTTTGCTGATGAACTCGGGT
GGTATTGCCACGCGGCTTATCGACGCCGCGAAGGTGCTTGTCGGCCGCATGCCTGCCTCC
ATCGCCAATACGAATATCGCAGCAAATGGTCTCTTCGGAGCAGTTTCAGGGGCAGCGGTA
GCATCAGCTTCTGCCGTGGGAACCGTCATGACACCAAAAATGAAGGAAGAGGGCTACTCG
CGCGCTTACGCAGCGGCCGTCAACGTGGCTTCAGCACCTGCGGGCATGCTGATCCCGCCA
TCAAACACTTTTATTGTGTATTCCTTGGTGTCCTCGACATCAATTGCAGCACTATTTATG
GCCGGTGTTGGACCCGGTCTGCTCTGGATTCTGGCCTGTGTCATCGTGGGAACTTGGTTA
GCGCGAAAGGAAAACTACAAGCGCGAGCAGATTCATCCAACATTCAAGCAGTCGCTCGTT
GTGCTGTGGAGGGCGCTGCCTTCACTGCTCATGATCGTCATTGTTGTTGGAGGTATCTTG
CTGGGCTGGTTCACTCCAACTGAATCCGCTGCTATTGCTGTAGTGTACTGCCTGGTCTTG
GGCTTTATTTACCGCACAATCAAGGTGGGAGATGTGGCAGATATTTTGCTCAAGGCAACT
CGCACCACATCAATTGTCATGTTGCTCATTGCAGTTTCTGCAGCACTGTCGTGGGTGATG
GCCTTTGCCAAGATCCCTCAGATGATCTCTGATGCGCTTCTTTCGGTATCCGATTCCAAG
GTTGTCATGTTGTTGATCATGATGTTCATCCTGTTACTCATGGGTAGCGTAATGGACCCA
ACACCAGCAATTTTGATCTTCGTCCGGATCTTCGTTCCAGTGGTTACCGAACTTGGTGTG
GACCCAGTCCACTTCGGTGCGATGGTGGTAATGAACCTGTCCGTGGGCGTGATTACCCCA
CCAGTAGGCAACGTGTTGTTCGTTGGTTCGCAAGTGGCAGGGCTGCGTGTGGAAACTGTG
ATCAGACGACTGTGGGCGTATCTCATTGCCATTATTGTTGCGCTGTTCGTGGTTGTTTTC
GTACCGCAGATCTCTATCTGGCTGCCGACAACAATGGGATTGATGGGAGGC
>RXA02394-downstream
TAAACCTCCAGCCATCAGCTAAG
>RXA02402-upstream
CACTACTGCGTTAAGGTATGAAAGTTCGCACACCAGCGATTTAATTCTGTGCCCACCACT
AGCACGAGCATTTCAGTTTTAACTTTCTTGGAGTTTTCTA
>RXA02402
GTGTCCAAAACAGAAGAAGGCCGTTCAGCGGCGATAATTATTTACGCGTTTCCAACTTTG
ATTGTGCTGGGCGCGATCATTGCGTTTATCTTCCCGGAACCATTCATTCCGCTGACAAAC
TACATTAATATCTTCCTCACGATCATCATGTTCACCATGGGTTTGACCTTGACGGTGCCC
GATTTTCAGATGGTGCTTAAACGTCCACTGCCTATCTTGATCGGTGTAGTAGCGCAGTTT
GTCATCATGGCATTCCTGGCGATCGTGGTTGCGAAAATGTTCAACCTCAACCCAGCACTC
GCCGTTGGCCTTCTCATGCTGGGATCGGTTCCGGGTGGCACCTCCTCCAATGTGATTGCG
TTTCTGGCCCGAGGAGATGTCGCGCTATCGGTCACCATGACCTCTGTGTCCACGATTGTT
TCCCCAATGATGACGCCTTTCCTCATGCTCATGCTGGCAGGTACTGAAACCGCCGTCGAT
GGTGGAGGCATGGCGTGGACTTTGGTACAAACAGTGCTGCTGCCTGTGATCATCGGCCTA
GTTCTGCGTGTCTTCTTGAACAAGTGGATCGACAAGATTTTGCCGATCCTTGCTTATGTC
TCCATCCTCGGTATCGGTGGCGTGGTGTTCGGCGCAGTCGCAGCCAACGCGGAACGACTC
GTGTCTGTCGGACTCATCGTGTTCGTTGCAGTTATCGTGCACAACGTACTTGGATACGTT
GTGGGATACCTCACCGGCCGTGTA
>RXA02422-upstream
CTTAAACGTCACCTTATTTATGCATTATGTTGGTTTCAGACTCGAACAATTCAATTAGAA
AACACTAATCGGACATTTAGGTCACATAACATTTCCGCTC
>RXA02422
GTGTCCACATTAATTTCTGAACCCGAGGTGGATAAGCTACGTAAACGTGCCAAGAGATCA
AGGCGGACAGAATGGTGGCTTGCCGCCGCACTTCTTGCCCCAAACTTGCTTCTCTTGGCC
ATCTTTACGTATCGGCCACTGTTAGATAACTTCCGGTTGTCCTTTTTCAACTGGAACATT
TCCTCGCCCACATCAAGCTTCATTGGGTTTGATAACTACGTTGAGTTCTTCACTCGTAGT
GACACTCTCCAAGTTGTTTTAAACACCGTCATCTTCACGGCATGTGCTGTGATCGGATCG
ATGGTGCTCGGTTTGCTCGTGGCGATGTTGTTGGATCAGAAGCTTTTCGGCCGTAACTTT
GTGCGTTCCATGGTGTTTGCCCCGTTTGTGATTTCCGGTGCTGCCATTGGTGGTGCTTTC
CAGTTCGTTTTTGAC
>RXA02438-upstream
CAGGTTGGAACCCTGACTGGTTCATGTTCTTCCTCGGCGGCACCCTACTTCTGGCTGTTT
TGCTCAATCACCGATTCGAGCGTTTCAACAAGGAGCGATC
>RXA02438
ATGACAGACCTCATTCAACTCCGCGAAGTATCCAAAAAATACGGTGGTTTCCAGGCCCTC
AACGACATCAATTTGAACGTCCGCGCAGGCGAAGTCACCTGTGTTCTGGGTGACAACGGC
GCCGGAAAATCCACCCTCATCAAGATTCTCTCCGGCCTGCATCCCGGCACCTCCGGCGAA
GTAATCGTGGCCGGCGATGTAGTGAATTTTGGATCCCCCCGCGACGCCCTCGACGCCGGA
ATCGCCACCGTCTACCAAGACCTAGCAGTGGTCGGGCAGATGAGTGTGTGGCGCAACTTC
TTCCTCGGCCAGGAACTCACCGGCCGATTTGGCGTTCTGAAACAAGAAGAAATGCGCCGC
ATCACCGACGAACAACTCCGCGAAATGGGCATCGAACTCCGCGATGTCGACGTCCCTGTG
GCCTCCCTTTCAGGTGGTCAACGCCAAGTTGTCGCCATCGCCCGGGCCATCTACTTCGGC
GCGCGCGTCCTCATTTTGGACGAGGCCACCGCAGCGGTGGGCGTGAAACAATCTGGCATG
GTGCTGCGCTTTATTGCCGGAGCACGCGACCGGGGGATCGGCGTCATTTTCATGACGCAC
AACCCCCACCACGCCTACCTTGTCGGTGATCACTTCATCCTGCTCAACTTAGGCAAGCAG
GTCATGGACAAATGGCGCGCAGAAGTCGAGGTGGAAGAAGTCACCCTCGGCATGTCCGGC
GGCGGCGAGCTCGACTCACTCAGCCACGAATTGAAGCGT
>RXA02438-downstream
TAACCTAGTTCTTCTTTTCGCTC
>RXA02439-upstream
GCACCACTGTTGGTGGCGGACGACCCGTGTACACAGGACCAGCCATTGTGGATGCCACCA
ACGTTGATGTCATTGCTGAAGCCGTTGGGGAGGGTCTGCG
>RXA02439
ATGACAAAAATCAAGAGTGGGGAGGCGTCGACAAGCATTGTTGAGCGCGCCTTAAAGCGC
CCCGAACTGACCAGCGTGCTTGGCGGCGTGCTTGTTTTTACGCTGTTTATGGTGGTCGCG
GCGGCATTTAGGTCATGGGATTCGATGGCGACCGTGCTGTATGCGAGTTCCACGATCGGC
ATCATGGCGGTTGCCGTGGGCGTGCTGATGATCGCTGATGAATTCGACCTGTCGACCGGC
GTTGCCGTGACAACTGCAGCGCTGGCGGCCTCGATGTTTAGCTATAACCTGTGGCTGAAC
ACCTGGGTGGGCGCGCTGATTGCATTGGTGATTTCGCTGGCCATCGGCTTTTTCAACGGC
TTTTTGGTAGTGAAAACCAAGATTGGATCCTTCCTGATCACCCTTGCCACTTTCCTTATG
CTGCAGGGTATTAATCTGGCGGTCACCAAGCTGATTTCCGGCACCGTGGCCACGCCAACC
ATCGCGGATATGGAAGGTTTTCCTTCAGGGCGTGCGGTGTTTGCCAGCTCGATTCCCATC
TTTGGTGTGAATATTCGCATCACTGTTTTTTGGTGGCTGCTGTTTGTTATCGTCGGCACT
TTTGTGTTGTTTAAGACGCGCATCGGCAACTGGATTTTTGCGGTCGGTGGCGATGAAGAG
GCAGCTCGCGGAGTCGGGGTTCCCGTGCGTGGCGTGAAAATCGGCCTGTTCATGTTCGTT
GGTTTTGCCGCCTGGTTTGTGGGCATGCACAACCTGTTCCTCTTTGATTCGATTCAGGCT
GGTCAAGGCGTGGGTAATGAGTTCCTCTACATCATCGCTGCGGTGATCGGAGGCATCTCC
ATGACTGGTGGGCGCGGAACAGTGGTGGGCACAATGATTGGTGCACTCATCTTTGGAATG
ACCAACCAAGGCATTGTTTATGCAGGTTGGAACCCTGACTGGTTCATGTTCTTCCTCGGC
GGCACCCTACTTCTGGCTGTTTTGCTCAATCACCGATTCGAGGGTTTCAACAAGGAGCGA
TCA
>RXA02439-downstream
TGACAGACCTCATTCAACTCCGC
>RXA02441-upstream
CCGGCGACCAGGGCGCGGGAGATGAATGAAACGTCAAAGGCACTATGAGGGCGTCAGTA
AAAAACTTCATTTGAAAATGATAACCGTTATCATTAAGGA
>RXA02441
ATGGCAGAACTGAGCGTCCGGAATCTCACATGCACATACGGCAATCACATCGCGCTCAAC
AACATCACGGCACGCTTCCCAACCGGAAAAATAACTGCCCTCATCGGCAGCAACGGCTCC
GGAAAATCCACACTGTTGGAAACTTTGGCGGGCATGCTGGCACCCCGCAGCGGAAGCATT
AACAACGTTGTGCCAGAAATCGCGTTCGTCCCCCAACGCAGGCACGTCTCGGATAATTTG
CCCATCAGGATCAGACAAACAGTCAGCATGGGGCGATGGTCAGCCAAGAAAAACTGGCAA
CGACTCACTGCCGCAGATTGCAACATCGTGGACAGCTGGCTCGACCGGCTCGAAATCTCC
GGCCTCGCCGACCGCCCCCTCGGCGAAGTATCAGGCGGGCAGCGCCAACGCGCCCTCATA
GCGCAAGGTTTAGCGCAACAGGCGCCGTTATTGCTTCTCGACGAACCCCTCGCCGCCGTG
GACTCCCACGCGGCAAGTCTTATCGAAGATGTCATTAACCAACAACGGAACCAAGGAACC
ACAATTATTCTTGCGACTCACGATCTTGATCAAGCACATCAAGCAGATCAGATTATCGCC
TTGGAAAAAGGAATCATAAAGCCACAGCGCAAAGCCACTGAATCAATAAAGAAGCGT
>RXA02441-downstream
TAATAAAGTTTGACTTGTGCCTC
>RXA02442-upstream
GCGGTGATGTTGTTGAGCGCGATGTGATTGCGGTATGTGCATGTGAGATTCCGGACGCTG
AGTTCTGCCATTCCTTAATGATAACGGTTATCATTTTCAA
>RXA02442
ATGAAGTTTTTTACTGACGCCCTCATAGTGCCTTTTGACGTTTCATTCATCTCCCGCGCC
CTGGTCGCCGGATGCCTGGCCGCAATTTTATGCTCACTCATTGGAACGTGGGTTATTTTG
CGCAGGCTAACCTTTTTCGGCGACGCTATGTCGCACGGCTTGCTCCCCGGAGTAGCCACG
GCATCACTATTGGGCGGAAATCTCATGTTCGGCGCAGCAATCAGCGGATTAATCATGTCA
GCCGGAGTGGTGTGGACCAGGAGAAAATCCAGCCTCTCGCAAGACGTCAGCATTGGCCTG
CAATTTATTACCATGCTTTCCCTCGGCGTGGTTATTGTGTCCCACTCCGATTCCCACGCC
GTAGACCTCACCAGTTTCCTTTTTGGAGACATTCTTGGCGTGCGACCCTCGGATATATTC
ATCATCGCCATTGCAACAGTGTTGGGTGGATTGACTATTTTTGTCTTCCACCGACAGTTC
ACTGCACTCGCTTTCGACGAGCGTAAAGCTCACACCTTAGGACTCAATCCCCGCTTTGCA
CACCTAGTCATGCTGGCACTGATCGCATTAGCTACGGTGGTGTGGTTTGAGGTGGTGGGA
ACGCTTTTAGTGTTTGGACTTGTCATTGGTCCGCCCGCCACGGCTGGACTTTTAGTGCAA
GACAAAGCAAGTATTTGACTGATCATGATCGTCGCGTCGCTTCTTGGATGCGCGGAAATT
TACCTCGGGCTTTTAATCAGCTGGCACGCAAGCACTGCCGCGGGAGCCACTATCACTTTG
TTAAGTGCTGCGATATTTTTTGCCACCTTATTGACAAAGAGTGGCATTAGTAGGTTAAAC
TTCACCGCG
>RXA02442-downstream
TGATACTGAAAGACATTTTCAAT
>RXA02447
TGGGTGTGGCTGGCGGAAATCTTCCCAGTCCGAATGAAGGGTATCGGCACCGGTATTTCG
GTATTCTGCGGTTGGGGCATCAATGGGGTCCTAGCGTTGTTCTTCCCAGCACTGGTCTCC
GGCGTGGGTATCACCTTCTCCTTCCTTATCTTGGCAGTCGTCGGAGTCATTGCCCTGGCG
TTCGTCACCAAGTTTGTTCCTGAAACGGGTGGCCGCTCACTTGAAGAACTCGATCACGCA
GCATTCAGCGGCCAGATCTTCAAGAAGGCT
>RXA02447-downstream
TAAACCCCCTCCGATGTCTTTGG
>RXA02451-upstream
GATCAACTTAAGCCTCTAGCTATTTTCAACTGTGTTTCAGTTGCGGGATCGTTGGGTGCC
TAATTGGAGTTGTGCTTTTAGGTGGAGGATCATAGAGGTT
>RXA02451
ATGAACACCGACACAACTCAAGACGGTGTGAGTCCTGAACCTTCCGACCCCCACCTAGGG
TCTGAAGTGGCGGAAACTCACCGCGAAAAGAAATTCTTCGGCCAGCCTTGGGGGCTGGCA
AATCTCTTCGGCGTGGAGATGTGGGAGCGATTCAGCTTCTACGGCATGCAGTCCATCCTT
GCTTTCTATCTGTACTACTCCGTCACCGATGGCGGACTTGGTATGAATCAGACAGCTGCA
CTGTCCATTGTGGGCGCCTACGGCGGCTTCGTCTACATGACCTCCCTCGTGGCTTCGTTC
ATTGCAGACCGAGTATTGGGCTCTGAACGTACACTCTTGTACTCCGCGATCATCGTCATG
CTGGGCCACATTGCCCTGGCCTTGATTCCGGGATATACGGGACTGTCCATCGGCTTGGTC
CTCATCGGCCTTGGCTCAGGTGGCGTGAAGACGGCAGCGGAGGTTGTGCTGGGCCAGCTG
TACTCACGCACGGACACGCGTCGAGACGCAGGCTTCTCCATCTTCTACATGGGCGTCAAC
CTCGGTGGCCTCTTTGGCCCGCTGATCACCAACGCTCTGTGGGGATGGGGAGGATTCCAC
TGGGGCTTCGGTATCGCCGCAGTCGGCATGGCTTTGGGTCTCATCCAATACGTGGCGATG
CGTAAAACCACGATCGGTGCGGCAGGCCATACTGTTCCTAACCCACTGCCTAAGAATGAA
TATGCGCGCTGGATTATCGGTGCAGTCGTGGTTGTCGCAGCAGTTGTCGCTGTCATCGCA
ACGGGCATCATCAAGCTGGAATGGCTGTCCAACATCACCGCAGCGATCGCACTGATTGCG
GCTATTGCTCTGCTTGCTCAGATGTACGTTTCCCCACTGACCACCGCAGCGGAAAAGTCC
CGCTTGTTGGGATTCATCCGGATGTTCATCGGTGGCGTGCTTTTCTTCGCGATCTTCCAA
ACCCAGTTCACGGTCCTCGCGGTTTACTCCGACACCCGCCTGGACCGTAACTTCTTCGGC
ATTGATCTTCCTCCAGGATTGATCAACTCCTTCAACCCAATCTTCATCATCATCTTCTCC
GGAATCTTTGCCACCTTGTGGACAAAACTCGGAGCAAAGCAGTGGTCTACTGCAGTGAAG
TTCGGTGTCGCCAACATTGTCATTGGTTGCGCGCTGTTCTTCTTCCTGCCGTTCGCCGGC
GGTGCAGAGAACTCTACCCCAATGGCACTGATCATTTGGGTCTACTTCCTCTTCACCATC
GCTGAGCTTCTGCTCTCCCCTGTCGGCAACTCACTTGCAACCAAGGTCGCACCCGAGGCA
TTCCAGTCCCGCATGTTCGCCGTGTGGCTGATGGCTGTCTCCATGGGTACGTCCCTGTCC
GGCACCCTGGGTGGTTACTACGATCCAACCGATGCAGGATCTGAAAAGGTCTTCTTCATT
ACCGTTGGCGTTGCAGCCATCGTTCTTGGTGCAATCGTCATAGCAGCCAAGGGCTGGGTG
CTGAAGAAGTTCATCGACGTCCGA
>RXA02451-downstream
TAGGCCTCACAAAGCCTCAAAAC
>RXA02491-upstream
TTTCGTATGCTGACATGGTGTCGCTTCAACTGCGTTGCTTTAGTGCCCTTTAGTATATAG
AGACGTCCCGCTGCTTTCTTCGGCGATCTAGAATGTGGGC
>RXA02491
ATGGGCGTAGCTATGATTTCCATGCACACCTCTCCATTGCAGCAGCCCGGAACTGGTGAT
TCAGGCGGGATGAACGTCTACATTCTTTCGACCGCGACTGAGCTAGGGAAACAGGGTATC
GAGGTCGATATTTACACTCGTGCCACGAGGCCTTCTCAGGGTGAGATGGTGAGAGTAGCT
GAGAATTTGCGGGTGATTAATATCGCTGCGGGGCCGTATGAGGGGGTTTCCAAAGAGGAG
GTTCCTACTCAGTTGGCGGCGTTTACCGGCGGAATGTTGTCGTTTACGCGCCGGGAGAAG
GTTACTTATGATCTGATCCATTCTCACTATTGGCTGTCTGGTCAGGTGGGGTGGTTGCTG
CGCGATTTGTGGCGGATTCCCCTTATTCATACGGCACACACTTTGGCGGCGGTGAAGAAT
TCTTATCGGGATGATTCGGACACTCCGGAGTCGGAGGCGCGTCGCATTTGTGAGCAGCAG
CTGGTGGATAACGCTGACGTGTTGGCGGTGAACACTCAGGAGGAGATGCAGGATTTGATG
CATCACTACGATGCGGATCCGGATGGGATTTGTGTGGTGTCACCGGGTGCGGACGTGGAA
CTTTATAGCCCTGGAAATGATCGCGCGACGGAACGTTCCCGTCGTGAGCTGGGCATTCCG
CTGCACACAAAGGTAGTGGCTTTTGTGGGTCGGTTGCAGCCGTTTAAGGGCCCGCAGGTG
CTGATCAAGGCGGTTGCGGCGTTGTTTGATCGCGATCCGGACCGAAATGTGCGCGTCATT
ATTTGTGGCGGCGCTTCTGGTCGGAATGCGACACCGGATACCTATAGGCATATGGCAGAG
GAACTGGGCGTCGAAAAGCGAATTCGCTTTTTGGACCCGCGCCCGCGGAGCGAGCTAGTG
GCCGTGTATCGGGCGGCGGACATCGTGGCCGTGCCAAGTTTTAATGAGTCCTTCGGAGTC
GTCGCCATGGAGGCGCAAGCCAGCGGCACACCGGTCATTGCGGCCCGGGTTGGCGGCCTG
CCCATCGCAGTCGCGGAAGGGGAGACGGGATTGCTTGTCGACGGCCACTCCCCGCATGCC
TGGGCCGACGCGTTAGCCACACTCTTGGAGGATGACGAAACGCGCATCAGAATGGGTGAA
GACGCCGTCGAACACGCCAGAACATTCTCCTGGGCGGGCACCGCCGCACAGCTATCGTCG
CTGTACAACGACGGTATTGCCAACGAAAATGTCGACGGTGAAACGCATCACGGC
>RXA02491-downstream
TAAGTAAACGCGCGTCGTGGAAC
>RXA02507-upstream
ATTACCCACAATTTCAATCGGTTTATACAACCAGCCTCTAACTGGCAACAGGACTGCAGA
CAGAAACTGTTGCTGGAACCTTCGATGAACAGGATCGACA
>RXA02507
ATGAGCGAACAACTTCAGGGTGTAACTCACTCCGAATCAACTCCGGGCAAGACGCCCAAG
CGAGCAGCACTATCCAGCTGGATCGGCTCAGCTCTCGAATACTACGACTTCGCTGTTTAC
GGAACCGCTGCAGCGCTGGTTCTTAACCACCTCTTCTTCCCAGCTGATACTTCACCAGGC
ATCGCAATTTTGGCTGCGATGGGTACCGTGGGTGTTGCTTATGTGGTTCGCCGTCTTGGT
GCGCTGATCATGGGTCCATTAGGTGACCGTTACGGACGTAAATTTGTCCTCATGCTGTGC
GTCTTCCTGATTGGAGCATCCACTTTCGCAGTTGGCTGCTTGCCAACATTTGATCAGGTC
GGTTACTTGGCTCCGGCACTGTTGGTGCTGTGCCGTGTGATCCAGGGACTGTCTGCATCC
GGTGAGCAGTCCAGTGCGATTTCCGTTTCTTTGGAGCACGCCGATGAGCGTCACCGCGCA
TTTACTGCTAGGTGGAGTCTTCACGGAACCCAGTTCGGTACCTTGCTGGCAACCGGAGTA
TTTATCGCATTCACCTTGTTCCTGAGTGAAGATGGTCTAATGTCATGGGGTTGGCGCGTT
CCGTTCTGGCTGTCCGCTGCTGTTGTTTTGGTTGGTTTCCTCATCCGTCGTGGAGTGGAA
GAGCGACCAGCATTCCGTGAAAACAAGGAAGCAGTTGCAGGCGCAGCATCTCCACTGGCG
ATGACCTTGCGTTACGACAAGGCGGCGGTTGCTCGCGTTGCTATTGCTGCGATGATCAAC
TCCGTGAACATTGTGTTTACTGTGTGGGCACTGTCGTTCGCCACCAACATTGTTGGCCTG
GATCGTTCAACTGTTTTGCTGGTTCCAGTTGTTGCGAACTTGGTTGCACTGATTGCGATT
CCTTTGTCCGGCATGCTGGCTGACCGCATTGGTCGCCGACCAGTGTTCATCATGGGTGCC
ATTGGTGGTGGCCTGGCCATGAACGGTTACCTGGGAGCTATCTACTCCGGCAATTGGACC
ATGATCTTCTTCATGGGCGTGTTGATGTCTGGTCTGCTGTACTCCATGGGTAATGCCGTG
TGGCCAGCGTTCTACGCAGAAATGTTCCCAACCTCTGTGCGTGTCACCGGCTTGGCTCTT
GGAACTCAGATTGGTTTCGCAGTCTCTGGTGGTTTCGTCCCAGTTATCGCATCCGCGCTT
GCTGGTGATCAGGGTGACCAGTGGATGAAGGTGTCCATCTTCGTTGGTGTTGTTTGTGTG
ATTTCTGCACTGGTTGCCATGACCGCTAAGGAAACCAAGGCTCTGACTCTGGATGAGATC
GATGCTCTGCACACTGCTGGTGGTGAGGCCGCAGACCTGGCAGCCGCAAGCAAAGCCTCC
GAGGCCCAACTCGCGGCTCAG
>RXA02507-downstream
TAAAACCAAAAGGAATCTTTGAC
>RXA02515-upstream
GTGGCTAAGCACAGTTAGTTGGCGAAGCTGGGCGGCAGAAAAACCGGCCGAGCTAATACT
TCAGTTTAAAATTGGCTTCAACCCTGAAAGATTGTGACAG
>RXA02515
ATGAGCAGTCTTGAAATGGGTAACCTGCACGCACAGGTCCTGCCGTCCGATGAGTCCGCT
GAGCCTAAGGAAATCCTCAAGGGCGTCAACCTCACCATCAACTCTGGTGAGATCCACGCC
ATCATGGGCCCTAACGGTTGGGGCAAGTCCACTCTTGGTTACACCCTTGGTGGACACCCA
CGCTACGACGTAACCGCAGGCGAGGTCCTCCTCGACGGCGAGAACATCCTGGAGATGGAA
GTTGATGAGCGTGCAGGCGCTGGTCTCTTCCTGGCCATGGAGTATCCAACTGAAATCCCT
GGCGTTTCCGTTGCTAACTTCCTGCGTTCCGCAGCGACCGCAATCCGCGGCGAGGCTCCT
AAGCTTCGCGAGTGGGTTAAGGAAGTCGGCACCGCTCAGGAAGCTCTGGCAATTGACCCT
GAGTTCTCCAACGGCTCAGTCAACGAAGGTTTCTCCGGTGGCGAGAAGAAGCGCCACGAG
GTTCTGCAGCTTGATCTGCTGAAGCCAAAGTTCGCGATCATGGATGAGACCGACTCCGGC
CTTGACGTGGATGCACTGCGCATTGTTTCCGAGGGCATCAACTCCTACAAGCAGGAGACC
GAAGGTGGCATCTTGATGATCACCCACTAGAAGCGCATCCTCAACTACGTTAAGCCTGAC
TTCATTCACGTTTTCGCGAATGGCCAGATTGTGACCACCGGTGGCGCTGAGCTTGCTGAC
AAGCTCGAGGCTGACGGCTACGACCAGTTCATCAAG
>RXA02515-downstream
TAACATGTCCGATTTCCTCAATG
>RXA02562-upstream
CGGGTGCGCTGAGGGTGAGGTTGGGGCGACGAGGCGTGCATGGACTTTAGGTTAGGTTAT
TGAGCAGATTTATTTGGGCTTTTGTCTAGGGTGGGGAGCT
>RXA02562
ATGTTCTTGACAAAGGTTTCGCTGCTTGATCATCCGGAGTCATTGCCGGGGTATTTATCG
AGCCTGGCGATCGTGGAATATCTGCATGAACAGCCGTTGGAGTTTCGTGCACCGATTACT
GTGATTACTGGTGAAAATGGGGTGGGTAAATCCACGTTGGTTGAGGCTTTGGCGGTGGGG
ATGCGCCTTAATCCGTCTGGTGGCTCTAGGCATGCAAACTTTGGCAGGGAAGGCGATATT
GTGTCGTCGCTTCATCAGTCGTTGAAGTTGGTGCGGAGAGAAAACCCTCGGGATGCGTTC
TTTTTTCGGGGTGAGACGATGTATAACGTGGCTTCCTATTATGAGGAGTTAATGGGGGAA
AAGAACATGCATGATCTTCACAAGATGAGCCATGGCGAATCGGTATTTGCGGTGATTGAT
CGGCGTTTTAACAATCAAGGATTTTTTGTTTTGGACGAGCCTGAGGCAGGCCTTTCCATG
CTGAGGCAGTTGGAGTTGTTGGGAAAGTTGGGCAACCTTGCTCGAGGTGGTGCGCAGATC
ATCATGGCTACGCACTCTCCAATATTGTTGGCTATTCCGGGGGCAGAGATCCTTGAAATT
ACATCTTCGGGTGTTGCAAAGGTGAATTTTGAGGATGCGGAGGCTGTTCGTGCGGCTCGG
GAATTTGTGGCAGATCCGCGAGGTACGGCGGCGTTTCTGACTGCGGAGGAGGATCACCAA
>RXA02562-downstream
TGATGCCGTATATCACCGATATT
>RXA02595-upstream
GTGGGTAAAGGGGACTCCGAGGAAGTCCACGTCGTCTTCTTTCGCGGCGCTGAGGATGGT
TTCGCGGATTTGTGCGGGGGAGTGGGTGGGAGAGAAAACG
>RXA02595
GTGATCGTTGTGGCCATGGCTTCCATTATGGCTTGTTTAAAAGCAGCTAGACTGAATAAC
CCTATGAAGATCCTTTTGTTGTGCTGGCGTGATACCACTCATCCTCAAGGTGGCGGAAGT
GAACGCTATCTGGAGCGGGTGGGTGAGTTTTTGGCGGATCAGGGCCATGAGGTGGTGTTT
CGTACTGCTGGGCACACGGATGCGCCACGGCGTTCTTTCCGCGATGGTGTGAGGTATTCC
AGGAGCGGTGGGAAGTTTAGTGTGTATCCCAAGGCGTGGGTGGCCATGATGTTGGGTCGT
GTGGGGATTGGCACGTTTTCCAAGGTTGATGTGGTGGTGGATACGCAGAATGGCATTCCG
TTTTTTGGAAAGTTTTTCTCCGGTAAGCCGACTGTGTTGCTCACGCATCATTGCCATAAG
GAGCAGTGGCCGGTGGTGGGTCGGGTGCTGGCGAAGGTTGGTTGGCTGATTGAGAGCCAG
ATCGCGCCGCGCGCTTACAAAACTGCGCCGTATGTGACTGTTTCAGAGCCGAGCGCTGAG
GAGCTCATTGCGTTGGGTGTGGATCAGCAGCGGATTCATATCGTGCGCAATGGCGTGGAT
CCCGTGCCGCTGGACACGGCGAAGCTGGATCGCGATGGCCAGCATGCGGTG
>RXA02597-upstream
ATACCCAGTTTGCAAGAATTACAAACGGGGGCAGCCTCAATGACTTGAAAGACTTTATAG
AGTAGAAAGTGAGTCACGACACTTTTTAAAGGAGGATGCT
>RXA02597
TTGCCCGAAGAAGACTTAACGAGCTTGGCCAATGATTGGCTCCAAGCTTTTGAAAAGGCC
ACTGCTAGTTCCAGCCCTGATGAAGCTGCCACTGCAGTCGTGCAACTTTTTGAGGATGAA
GGATAGTGGCGAGACCTTCTTGCATTGACGTGGAACCTCACCACCGCTGAAGGTGGAGAT
GAAATGGCCGAGATGATTCGCAATAGGTGGCCATCAAGCATCTTCCGAAACGTTGAGCTA
AAGGGCGAAGCAGGTGATGAAGGAGATGGTGTCAGTCGCGTACATTTCTCCTGCGAATCC
GCAGACTTGAAGTGCACGGGCATTGTCCGCCTTCGTAATGGCAAGGCGTGGACGCTACTC
ACCTGAGCTCGTGAGCTGCTGGAGCAGCCAGAGCCCAAGGGGCGCAACCGTGAGATGGGC
GTCGTCCATGGACAAAATGAGGACACCCGAAATTGGACTGACCGCAAGAATGATCGACAA
GCAGCGTTGGGTGTCACCGAGGAGCCATACACCCTCATGATCGGTGGTGGACAGGGTGGC
ATTGCCTTGGGCGCACGACTCAAGCGACTTGGTGTACCCGCTCTAATGATTGATAAAGCA
TCTCGCCCGGGCGACCAGTGGCGTAGCCGTTACCATTCTCTGTGCCTGCACGATGCAGTT
TGGTACGACCACGTGCCTTACATTCCATTCGCAGATCATTGGCCAGTATTTACTCCAAAG
GACAAGATGGGTGACTGGCTCGAGCACTATGTCGGCATGATGGATTTGGACTATTGGACC
AACACCGAGTGCCTGCGCGCCTCATACAATGAGGACACCAAGCAGTGGGATGTGACGGTG
AATCGTGATGGCGGGGAGTCCACGCTCCACCCGACCCAACTAGTCATGGGTACTGGAATG
TCGGGCAGCCCGAACAAACCAACTTTGCCTGGGCAGGATAAGTTCCAGGGTGAAATTGGG
CACTCTTCAGAGCACCCCGGCGGCGATGTCGATGGCGATAAGAACGTTGTAGTTCTGGGC
GCTAACAAGTCAGCGCACGACATCTGCGCGGATCTTTATTCCAATGGTGCAAAGCCCGTG
ATGATTCAGCGCTCGTCTACACACATCGTGCGTTCTGATTGGCTGATGCGCGAAGTCTTC
GGGCCTCTCTATTCTGAGGATGCCGTTGAAGCCGGAATTGATACGGATACTGGCGATCTC
CTGTTTGCGTCGTGGCCATATAAGGTGCTGCCAGGTGTGCAGAAGCAGGCTTTGGACAAG
ATCCGTGAGGACGACAAGGAGTTCTACGACAAGCTTGAAAATCCTGGATTCTTGCTTGAT
TTCGGCGATGACGATTCGGGGCTTTTCTTAAAGTACCTTCGCCGTGGCTCTGGCTACTAC
ATCGATGTCGGCGCCTCTGAACTGGTGGCTGATGGAAAGATTCCGGTGCGCTCCAATGTC
AGCATTGAAGACGTCAAGGAAAACTCTGTGGTGCTCACAGATGGTACTGAGCTCCCAGCT
GACGTGATTGTTCTAGCGACCGGCTATGGAAACATGAACAACTGGGTTGCTCAGCTGGTT
GATCAGGAAACCGCTGACAAGGTCGGCCCATGCTGGGGTCTGGGCTCTGAAACCACCAAG
GATCCAGGCCCATGGGAAGGCGAGTTGCGCAATATGTGGAAGCCCACAAACGTGGATTCG
CTGTGGTTCCATGGTGGCAACCTTCACCAGTCACGCCATTACTCACGGTATTTGTCCATG
CAGTTGAAGGCGCGCTACGAAGGTATGAACACTCCGGTGTACAGCAAG
>RXA02597-downstream
TAGATACAAAGAAAAGGGCATCT
>RXA02605-upstream
TGCGATCCTGTCATCTACATGTGGGAGAGTTTCCTTACCCAGGAATTGCCTGCATACCTT
GAGCAGAACTTCGGCGTTGCGCGAAACAACAACTCCATTG
>RXA02605
GTGGCCTGTCCATGGGCGGGAACTGCGGGGCTGAACCTCGCAGCAAAGCACCCAGATCAG
TTCCGCCAGGCTATGTCTTGGTCCGGCTACTTGAACACCACTGCGCCAGGCATGCAAAGC
CTGCTGGGTGTGGCCATGCTGGACACCGGTGGATTCAACGTCAACGCAATGTATGGCTCA
ATCATTAACCCACGTCGTTTTGAAAACGACCCATTCTGGAACATGGGCGGCTTGGCTAAC
ACCGACGTCTACATCTCTGCAGCTTCCGGCCTGTGGAGCCCTCAGGATGATGGAGTTCGC
GTAGACCACCGCCTCACTGGTTCTGTGCTTGAATTCGTGGCAATGACATCCACCAGGATT
TGGGAAGCAAAGGCAAGGCTTCAGGGTCTGAACCCAACTGCGGATTACCCAATGTATGGC
ATTCACGGCTGGGCTCAGTTCAACTCCCAGCTGGAGAGAACTCAGGGTCGTGTTCTAGAC
GTCATGAACGCCTGG
>RXA02605-downstream
TAGAGCCACACCAAAGGCCACAC
>RXA02614-upstream
TCATTGTATACGCCACCCTCGGTCTGCTGTCTGAAGCGCTGATCAGAGCTTGGGAACGTC
ACACCTTCCGCTACCGAAACGCATAAGAAAGTTGCTCGCC
>RXA02614
ATGACTGCCACATTGTCACTCAAACCCGCAGCCAGTGTCCGTGGATTGCGCAAATCATAG
GGAACTAAAGAAGTCCTCCAAGGAATCGACCTCACCATCAACTGCGGCGAAGTAAGCGCG
CTGATCGGACGCTCAGGTTCAGGAAAATCCACCATCCTGCGCGTGTTGGCGGGCCTATCT
AAAGAGCATTCCGGCTCTGTAGAAATTTCCGGAAACCCGGCCGTTGCCTTGCAAGAGCCT
CGGCTGTTGCCGTGGAAAACGGTGCTCGATAATGTGACCTTTGGCCTCAACCGCACTGAT
ATTTCCTGGTCAGAAGCACAAGAACGCGCCTCGGCACTGCTTGCAGAAGTCAAACTTCGC
GACTCCGACGCCGCCTGGCCCCTCAGGCTCTCCGGCGGCCAAGCCCAGCGCGTCTCCCTT
GCGCGAGCGCTCATCTCCGAGCCAGAGCTTTTGGTTCTCGACGAACCCTTCGGCGCCCTC
GATGCTCTGACAAGACTGACAGGGCAAGACCTGCTGCTGAAAACCGTGAACACCCGAAAC
TTGGGAGTTCTGCTGGTCACCCATGATGTTTCCGAGGCCATCGGCCTGGCCGACCACGTC
CTTCTTCTTGAGGACGGCGCCATCACACACAGTTTGACTGTAGATATCCCCGGCGATCGC
CGCACCCACCCCTCCTTTGCGTGCTACACCGCTCAACTCCTTGAGTGGCTCGAAATCACC
ACACCTGCC
>RXA02614-downstream
TAGAAAGAAATCATGAAATTTAA
>RXA02616-upstream
AGTGTTACTTCCGGTAGATAACAAGATGGTCTCAATTAAACTTCGATAGCGTGATATAAG
CTTCGAAAAGTTTTGTGGGAAGAATCGGAAGCAGGCGAAA
>RXA02616
TTGCAGAAGGACACTCGAGGTGGCAAGCACCGCAAGCAGACTACCTCCCCAGTAACTAAG
GGTGGTGTCGCTTTTGTTGCAGTAGCTACCGGTGCCGTGTCAACTGCAGGCGCAGGCGGA
GCAGTTGCTGCACAGGCTTCCAATCAGCCCGTTGAGGTCAACTTCGAGCTTACTGCAAAC
GACACAACTGACCTCGTGGCTGGAAGCTCCGCCCCTCAGATCCTGTCCATCGCTGAGTTC
AAGCCAGTTGTGAACTTGGGCGATCAGATCGTTAAGACCATTCAGTACAACGCTGACCGC
ATTCAGGCTGACCTGGACGCTCGTGGCCCTTCAGTGGTTGGCCCTGCTGAAGGTTCTTAC
ACCTCCGGCTTCGGTGCTCGTTGGGGCACCAACCACAACGGTGTGGATATCGCTAACGCA
ATCGGCACTCCAATCCTCGCTGCCATGGACGGCACTCTTATCGATGCAGGTCCTGCTTCC
GGTTTCGGTAACTGGGTTCGCCTCCAGCACGAAGATGGCACCATCACCGTGTACGGCCAC
ATGGAAACCGTTGAGGTGACCGTTGGTCAGACTGTTAAGGCTGGCGAGCGCATCGCAGGC
ATGGGTAGCCGAGGATTCTCCACCGGCTCCCACCTCCACTTCGAGGTTTACCCTGCAGGC
GGTGGCGCTGTTGATCCAGCTCCTTGGCTTGCAGAGCGCGGCATTACTCTT
>RXA02616-downstream
TAATTAACTTTTGGGCGACCCTT
>RXA02627
GATGTCACTGTGGAAAGCCAACCAGAACGCGTCGTTGCCCTGGGTTGGGGAGATGCTGAG
GCTGCGCTGGAATTCGGTGTGCAGCCTGTGGGTGCATCAGATTGGCTCGCATTCGGTGGT
GAAGGCGTGGGACCGTGGATTGAGGATTGTGCCTACGATGAAGCGCCAGAAATAATCGGA
ACCATGGAACCGGAGTATGAAAAGATTGCAGCGCTTGAACCGGATCTGATTTTGGACGTG
CGCAGCTCTGGCGACCAGGAACGCTATGACAAGTTGTCTTCAATCGCACTGACCATCGGC
GTTCCAGAAGGTGGCGATAGCTACCTCACCCCACGCGCTGAGCAGGTAACCATGATCGCC
ACTGCTCTGGGGCAGGCTGAACGTGGTGAAGAAGTGAACGCTGAATACGAGCAGCTCACT
GCTGATATTCGTGCAGCTCAGCCGGGCTGGCCTGAGAAGACCGCGGCTGGTGTATCTGCA
ACGGCAACCAGCTGGGGTGCATACATCAAGGGCTCCAACCGTGTAGATACTTTGCTGGAC
CTGGGCTTCCAGGAAAACCCTGAGCTGGCTAAACAGCAACCTGGCGATACGGGTTTCTCC
ATCAAATTCAGTGAAGAGACTTTCGGCGTTGTGGATTCCGACCTGGTTGTCGGCTTTGCC
ATCGGTATGACTCCTGAGGAAATGGCAGAGCAGGTTCCATGGCAGATGTTGACCGCCACT
CGTGACGGCCGTTCCTTTGTGATGCCCCGTGAGATTTCCAATGCGTTTTCTTTGGGTTCC
CCGCAGTCCACTCGGTTCGCGTTAGACGCCTTGGTGCCACTTCTGGAGGAGCATGCAGGG
GAG
>RXA02627-downstream
TAGTGGTCCGGTGGTGCGGGCAG
>RXA02628
ATGCTTGAAGGTTTTAGAGATTTCGTCCTTCGGGGAAATGTCATTGAACTCGCAGTTGCC
GTGGTCATCGGTACTGCCTTCACCGCTATCGTGACAGCATTCTCCGAGAGCATCATCAAC
CCATTGATCGCTTCCATGGGCAGCACAGAGGTTGAAGGCCTCGGCTTCGACATCCGCGCC
GGCAATGCCGGAACATTCGTGGATTTTGGTGGTGTCATCACCGCAGCGATCAACTTCCTC
ATCATCGCAGCAATTGTCTACTTCGTTCTCGTTGCTCCAATGAACAAGCTCAGCGAAAGG
CTCGCAAAGCGCAAGGGTGTTGAAGAAGACGAGACCCCAGCTTCCATCGAAGCAGAACTC
CTCACCGAGATCCGCGATCTCGTGGAGGAGCAAAAGCGCCTTCAG
>RXA02628-downstream
TAGTTAAAAGGCCCTAAAAGCAC
>RXA02650-upstream
GAATTTTTGCTGCAACTGTGTAAAAACCAGCGGTGAATTAAAGATCACCTTTCACCCTTA
ATTGAGCCTGGGTGGAAGTTTCTACCGCTCATGGGGAAAG
>RXA02650
ATGGTCAACGTGACCTCAAAGGATGCAGGGGCAAACGTGACCCCCATGAGTAAGAAAGAA
AAGAGGACAACCGTTAAACAGGTGGTTGCCTTGATGGCCGCCATCGTTGTGGTGATTGCG
TCCCTAGACCAAATAGTCAAGGAGATTATGCTTAGTTGGTTGGAACCTGGCGTTCCCGTT
CCCATCATTGGGGATTGGTTCCGCTTCTACCTCCTGTTTAAGCGCGGAGCCGCATTTTGG
ATGGGTGGGGAAAACAGCACCTGGATCTTTACAACCATCCAGTTGAGCTTGGTCATCGGT
ATCGCAATTTATGCCCCACGCATCAAACAGAAGTGGATCGCGGCAGGACTTGCCCTTGTT
GCCGGTGGAGCCTTGGGAAACGTGTTGGACCGGTTGTTCAGAGATCCTTCCTTCTTCTTC
GGACATGTTGTTGATTACATCTCCGTAGGAAACTTTGCAGTATTTAATATCGCCGATGCC
TCGATTTCTTGCGGCGTCGTGGTGTTCCTGATCGGAATGTTCCTTGAGGACCGTGAAAAC
GCCCAGCATGCCAAAGCAACTGACGAGAAGGATGAGGCC
>RXA02650-downstream
TGATGAACAACCGACAAAGCAGA
>RXA02660-upstream
CATTTTTCAGCACACTTTTTAAGATCTCATCGAAAGCGCGATACCCACTATGTCCAATCT
TTTGAGACTTGTCGGCCGACGGCTCATCGCTTTACCGATC
>RXA02660
ATGATTATTGGCGTCACCCTGCTGGTTTTCATCGTCATGTCATTCTCTCCTGCCGACCCG
GCACGAGTTGCCCTAGGCGAATCAGCCTCCCCCGAAGCACTTGAAGCCTACCGTGAAGCC
AACGGCCTCAACGATCCAATGATGGTTCGCTATTTCGACTTCATCCTCGGCATGCTCAAA
GGCGACTTGGGAACCTCTAGCGGTGGCGTAGCTGTTACCGACATTGTTGCCCGCGCTTTC
CCCATCACCCTGCAGCTAACATTCTGGGGACTCATGATCGCTGTTGTAGTGGCGTTGATC
CTCGGTGTCATGGCCGCTCTATACCGAGACCGCTGGCCTGACCAGTTGATTCGCGTGGTC
TGCATTGCGGCTCTTGGTACTCCTTCATTCTGGTTGGCTATCTTGCTGATCGAGTGGTTG
GGTACTATCCCTGGAGCCTGGGGTTTCTTCCGAGCACTTGTCACCCGGTGGGTGCCATTC
AGCGAAGATCCCGCCACCTACTTCAACAACATCGCACTTCAGCGATTGCGTTGGCAGTCC
CCGTTGCAGGTTCTTTGGCCCGCGTTGTTCGTACCTCCATGGTGGAAGAACTGGACAAGG
ACTAGGTCCGCACAGCAATCGGTGCAGGATCCCCAAAAC
>RXA02660-downstream
TGAAGTTGTTGCCCGCAATGTTC
>RXA02661-upstream
TGGACAAGGACTACGTCCGCACAGCAATCGGTGCAGGATCCCCAAAACTGAAGTTGTTGC
CCGCAATGTTCTGCGCAATGCGCTGATCACCCCAATCACC
>RXA02661
GTGATTGGTCTTCGCGTTGGTTCGCTCATGGGTGGTGCGGTGATCATTGAGATCATCTTC
AACATCCAAGCAATGGGACAGCTCATCCTAGACGGTGTGACCCGAAATGACGTCTACCTC
GTCCAAGGTGTCACCCTCACCGTTGCCATCGCCTTCATCATCGTCAATATCGCCGTGGAC
GTGCTCTACGTCCTGGTCAATCCACGTATTAGGAGCATC
>RXA02661-downstream
TAGATGCGCCGTAAACTAACCAC
>RXA02663-upstream
GTGCAAATATCTGTCCAGTTCGTGAGACTACGTCAATGCTTCCAAGGTCATTGGCGCATC
AACCGCTCACATCTTGATCAAGCACGTTGCGCGAAACTGC
>RXA02663
ATGGCTCCGATTCTGGTGTTCGCCACCGTCCTGGTCGCCGATGCGATTGTCTTCGAAGCA
TCCCTGTCCTTCATCAACGCTGGTGTGAAACCACCATCACCTTCATGGGGCAACATCCTT
GCCGATGGTAAAGCCCTGCTGGTTAGCGGCGGATGGTGGGCAACCTTCTTCCGAGGTTTG
ATGATCCTGCTGACCGTTCTCTGCTTGAACATGCTTTCTGAAGGCCTCACCGACACCCTG
GCCAGCCCTAAGCCAAAGCCTGTTTCAGCTTCTGCAAAGAAGGCACTGAAGAAGGAAGAA
TCCGGTGAAAAGGAAGGCTCCGGAATCGTGCTTGGGCACACCACACGTGAAGAAGCCAAC
GCCTCACTGCTCGCATCACTTGCTGCGCTATCCACCAGCGAAAACAATTCCAATAACCGG
CTTATATTTGATGGCAACCCCACTCCTCTGTTGGAAGTTCGCGATCTAAAGATCTCCTTG
GCCAATGCTCACGGAGATATCAATATTGTCGACGGCGTGAACTTCACCGTCGCCCCAGGC
CAAACCATGGGTCTTGTCGGTGAATCCGGCTGTGGTAAATCGATTACCGCAATGTCGATC
ATGGGTCTGCTGCCTCCAACAGCAAAGATCGAAGGCGAGATCCTTTTCGACGGAAAGAAC
CTCCTTGATCTGAAACCAGACGAGCTCAATGCACTGCGTGGACATGAAATCGGCATGATC
TACCAAGATGCACTCTCCTCACTCAACGCATCCATGGTGATCAGCGCCCAAATGAAGCAG
CTGACCCGCCGCGGTGGAAAGCGCAGTGCCGAAGAACTCGTGGAACTTGTAGGCCTTGAT
CCAAAGGGGACCCTGCAGTCGTACCCGCATGAGCTTTCAGGTGGCCAGCGCCAGCGAGTT
CTCATCGCAATGGCACTGACGAGAAACCGACGCCTCCTCATCGCCGACGAGCCAACCACC
GCGCTAGACGTCACTGTTCAGCAGCAGGTTGTGGATCTGCTTAATGAACTGCGTGAAAAG
CTCGGATTCGCCATGATCTTTGTATGCCACGACTTGGCTCTTGTCGCCCGCCTGGTGCAC
AAGCTCACCGTCATGTACGCAGGTCAGGTTGTTGAGCAAGGAACCACCCGCGAAATCCTT
ATCGATCCTCGACACGAATACACCCGCGGTTTGCTCGGATCCGTGCTCTCCATCGAAGCT
GGTGTGGACCGCCTCTACCAGGTCCCAGGCACTGTTCCATCACCAAAGGAATTCGTGGCA
GGCGACCGCTTTGCACCACGATCAGAATTCCCAGAACTTGGCCTTGACCAAAAGCCAGTA
CTTCGCCCCATCACGGGCACAGAGCATGCATACGCAGCAACCGATGAACTTCTTGCCGCA
AAGGGAGAACAACGA
>RXA02663-downstream
TGACCTCGACAATCGACACCAGG
>RXA02664-upstream
ATCCACAAAGAGCCGTACGGGAAAGCTGTTTCGCCCAGACCAGGTCCACGCCAACAAAAA
CATCAACTTCAAGGCCTACCGCGATGAAGTAATCGGCATC
>RXA02664
GTGGGTGAATCTGGTTGCGGAAAATCTACCCTTGCCCGCGTTATGGTTGGCCTGCAACCG
GTCACCTCCGGCGAAGTGCTGTTGAAAGGCAAGCCCATGAAGCCTCGTGGTGCGCAGCGC
AAAGAACTCGGCAGCTCAGTATCCGTCGTGTTCCAGGATCCTGCGAGCTCGTTAAAGCCA
CGAATGACCGTGCGCGAACAGCTCCTGGATCCACTTCGAGTACACAAAGTTGGCGATGAA
GCATCCCGCAACCAGTGGGTTTCAGAGCTGATCTCCATGGTTGGCCTCCCGCAATCCGCG
TTGGAAGTACTCCCCCGACAGGTTTCCGGTGGCCAACGCCAACGCGTGGCCATTGCTCGA
GCACTTGCGCTGAAACCTGACATCATCGTTGCCGACGAACCAACCTCCGCGCTGGATGTA
TGCGTTGGTGCGCAGGTCCTCAACCTTCTGCTGGATCTGAAAACTGAACTCGGCCTGGGA
TTGGTATTCATCTCCCACGAGATCAACACTGTTCGCTACGTTTCTGATCGCATCGCAGTC
ATGCTGGCTGGAGAAATCATTGAGGAAAACACCACCTCAGAGATCTTCAACAATGCGCAG
CAGGACTACACCCGCACTCTGCTCGAAGCGACACCATCGCTGCTGAACAAAACTCGTTTG
>RXA02664-downstream
TAGTCTCCAACCCTTTATTCCCT
>RXA02684-upstream
GCAGGTTCGTCCACAGCCGCCGGTGATTGCAGGGGATGGGGGGAGGCGTCGAAAAGCAAT
ATCTTTTAAGGCCCGTGGCTGCCTGGGCACGATCGCGGGC
>RXA02684
GTGCTTGGTGTGGGCTTGGTGCTTGTGTTTGTGGTGACGCTGTGGGGGGATTCGAAGCTG
AATCGCGTGGATGCCACGCCTGCGACGCAGGTGGCGAACACTGCCGGAACGAACTGGCTG
CTGGTAGGTTCGGATTCGCGGCAGGGTTTAAGTGATGAGGATATTGAGCGGCTAGGTACC
GGCGGCGATATCGGTGTGGGCCGTACGGACACGATCATGGTGTTGCATATGGCGCGTACT
GGCGAGCCGACGCTGTTGTGGATTCCGCGTGATTCTTATGTCAATGTCCCTGGCTGGGGC
ATGGATAAGGCAAACGCCGCATTTACCGTGGGTGGCCCGGAACTGCTGACGCAAACCGTG
GAGGAGGCAACTGGCCTGCGAATTGATCACTATGCAGAAATCGGCATGGGTGGTTTGGCG
AACATGGTTGATGCCGTGGGCGGGGTGGAAATGTGTCCTGCTGAGCCGATGTATGATCCG
CTGGCGAACCTGGATATTCAGGCTGGTTGCCAGGAATTTGATGGGGCAGCCGCGCTGGGT
TATGTGCGCACTGGTGCCACAGCCCTGGGTGATCTGGACCGGGTGGTGCGTCAGCGGGAA
TTCTTGTCCGCTCTGCTGAGTACAGCTACGTCCCCGGGCACGTTGCTGAATCCGTTCCGC
ACCTTCCCGATGATCTCCAACGCGGTGGGAACATTCACCGTCGGCGAGGGCGATCACGTG
TGGCACCTGGCCGGATTGGCGCTGGCGATGCGGGGAGGAATCGTGACGGAGACCGTGCCG
ATTGCCTCATTCGCAGATTACGATGTGGGAAATGTTGCGATTTGGGACGAAGCTGGAGCC
GAAGCACTATTTAGCTCCATGCGC
>RXA02684-downstream
TAAAACCCCAGGTAATCGTTCAC
>RXA02728-upstream
ATCCCATACGTTGCCTTCCGATCGGCATTTTCACAGCGCTGGTCGGCGGCCCAACATTCT
TCATAATGTTGGGCCGAATGATGAAAAGGGCGTGCACTAA
>RXA02728
ATGGCCATTGTTTCCCTCGACAACGTCACCGTATCCATTGAAGGAAAAAAGCTTCTCGAC
GCCGTCTCCCTCAAGGCCTACCCGGGGGAAGTGTTGGGACTCATCGGCCCAAACGGTGCC
GGAAAATCCACTCTGCTGAGTGTCCTTTCAGGCGATCGGCTTCCCGATTCAGGCGAAGTC
AACGTCGGTGGCTTAGATCCCGCAACAGCAGCGGCATCCGATATGGCCAGGGTGCGAGCA
GTCATGCTTCAAGATGTCAGCGTGGCATTTTCCTTCCTCGTGTGGGACGTCGTAGAAATG
GGCAGGCGGCCGTGGCAGAAGGCGTCAACCCCCGAAGAGGATCATGAAATCATCGAAGCA
GCGCTTGCCGCCACCTCGGTATCGCACCTTGCCGAACGTGAAATCACCACACTGTCAGGC
GGCGAGCGGGCACGCGTTGCCTTGTCCCGTGTCCTTGCTCAGCAAACCCCCATTGTGCTG
TTGGACGAACCAACAGCCGCGATGGATATCAGCCACCAAGAACAAACTCTGGGCACAGCG
CGAGCACTGGCAGCCGCCGGGGCAGCAGTGATTGTGGTCCTTCATGATCTCAATGCGGCC
GCTGCATATTGCGACAGCATTGTGTGTCTCAGTGATGGTCGAGTGATTGCCTCCGGTTCT
GTTGATCAGGTGTATTCCACGGAAACGCTGTCCCGTGTTTACGGTTGGCCTATCAGGGTC
GATCATAGTGGAAAATATGTTCGAGTGGAGCCGGACCGTTCTGAGGCGAATTTACCCTCC
GTACTACAGGTGAAAAATACGGTTTCACCAGCT
>RXA02728-downstream
TAGATACATGACTAACTAAGGTT
>RXA02750-upstream
GTTCCATGGACGATGTATTTCTAGCAGTTACAGCTGAACGGAAACGATCATGATTACAGT
TCTGACACGCAGACACTTGCGCTGCTTTTTCCGCGACCGC
>RXA02750
ATGGCAGTGCTGTTTTCCATCATGGGTGCGCTCATCCTTTTGGTCCTGTACGTGCTGTTT
TTAGGAAAACTGCAAATTGACGGTCTCATGGTGGATCTACCTGACTGAGCCCGAGACGAT
GTTGAAGGATTCGTCTTCAATTGGGTGTTTTCCGGAATTCTCATCACGTCCGCAATCACT
GTTCCGCAAGCAGCACTTGGAGTGCTGGTTGAAGATCGCACCCGCGGAGGCATCAAAGAT
TTCCTCGTGGCACCCGTATCCAGAACGACGCTGACGGTGTCCTATATCTTCGCAGCAGTC
ATTGTCGCCATGACGATTTTGATCTTTGAAATCGTGGTGGGAAGTATTGGTTTAGCTATT
TTGGGGCACTTCAGCATGAGCATTGCTCGCGTGCTCGAATTGGTAGTCGCCTTGCTTCTG
CTCACCCTGGTGTTTTCCGCAATTGCAGCATTTCTGATCACCTTGGTGAAATCTCAAGGC
GGAATGTCTGCGCTTTCAAGCCTGGTAGGCACCCTGGCGGGCTTTTTATCTGCTGCTTAT
ATTCCACCCATCGCATTGCCTGAAGCAGTGACAAACGTGTTGAACTTCCTCCCGTTTACC
CCAGCTGGAATGTTGATCAGACAAATTGTGGTTGCCCCAGCATTGGACGCGATTTCACTT
CCACCCGAAGCCTTCGATATCTTCCAATTCGGATACGGACTCAAACTGGAAATGTTTGGG
GAACCCGTTTCTACATGGGTGGCAGTAGGAATTGTTGCCTCATGGGGAGTGGTGTTTGGA
CTCATTGCCGCGTTCAAAATGAAAAGCGTGGTGCGA
>RXA02750-downstream
TAAATCCTGCTAAAGAATGCTTC
>RXA02761-upstream
CAGGTTGTTCTCATTGAGGTGGTTTCTCCGAGAATGCAGCTTTGATCGCCAACGTGGCGC
CAGAAGTGATCGCAGTTGTCGGGCATTCATCGCACTGTGG
>RXA02761
ATGATGGATGGTATCAACCGCCGTACCACCCTCATTACCGGTTATTCTCTCACCACCATT
AGCCACGTATTGATCGGTATCGCATCCGTAGCATTCCCAGTCGGCGATCCTCTTCGCCCC
TACGTTATCTTGACTCTGGTTGTGGTCTTCGTGGGATCCATGCAGACCTTCCTCAACGGT
AGCTACCTGGGTTATGCTCTC
>RXA02761-downstream
TGAGCTGTTCCCGCTGGCAATGC
>RXA02762-upstream
TTCCCAGTCGGCGATCCTCTTCGCCCCTACGTTATCTTGACTCTGGTTGTGGTCTTCGTG
GGATCCATGCAGACCTTCCTCAACGGTAGCTACCTGGGTT
>RXA02762
ATGCTCTCTGAGCTCTTCGCGCTGGCAATGCGGGGTTTCGCAATCGGTATCTCAGTGTTC
TTCCTCTGGATCGCAAACGCGTTCCTGGGATTGTTCTTCCCAACCATCATGGAAGCAGTA
GGACTAACCGGAACCTTCTTCATGTTCGCCGGAATCGGTGTGGTTGCCTTGATCTTCATC
TACACCCAGGTTCCTGAAACTCGTGGACGTACCTTGGAGGAGATTGATGAGGATGTTACT
TCCGGTGTCATTTTCAACAAGGAGATCCGAAAAGGAAAGGTGCAC
>RXA02762-downstream
TAAAAACCCAGACACTGCATAGA
>RXA02769
ACAGTAGTTCCGGTGTACCTCGCTGAACTCGCACCACTAGAAATCCGCGGCTCCCTGACC
GGCGGAAACGAGCTTGCTATCGTCACCGGCCAGCTGCTTGCCTTCGTGATCAACGCGCTT
ATCGCCGTCACCCTACACGGAGTTATTGATGGAATCTGGCGCATCATGTTCGCCGTCTGT
GCCCTCCCTGCCGTCGCCCTCTTCCTCGGCATGCTGCGGATGCCGGAATCACCACGCTGG
CTGGTCAACCAGGGGCGTTACGACGACGCCCGCCGCGTCATGGAGACCGTCCGTACCCCT
GAGCGTGCGAAAGCCGAAATGGATGAAATCATCGCGGTGCACTCTGAAAACAATGCGGCA
GTTCCTGGTGTTAAGCAGTGTTCGGGCCAGGGTTCAGGCCAGGTTTCTAGCAAGCACACC
CACATGTCCATCGGCGAAGTCCTCAGCAACAAATGGCTGGTTCGTCTGCTCATCGCCGGC
ATCGGTGTTGCAGTTGCCCAGCAGCTCACCGGCATCAACGCCATCATGTACTACGGAACC
CGCGTCCTCGAGGAATCCGGCATGAGCGCAGAAATGGCTGTGGTTGCCAACATTGCTTTC
GGTGCCGTTGCCGTCATCGGTGGACTGATCGCACTGCGCAACATGGACCGCCTGGATCGC
GGCACCACCTTCATCATCGGCGTGTCACTGACCACCACCTTCCACCTTTTG
>RXA02795
ATCGACGTCTCCCTCCCCGAACGCACCGCTTCGGCCTACCCACACGAACTTTCAGGCGGG
CAACGCCAACGCGCACTAATCGCAATGGCGCTGGCCAATGATCCTGACCTGTTGATCTGC
GATGAACCCACCACGGCTTTGGATGTGGTTGTGCAAAAACAAATCGTCGATCTGCTGCTG
GGTCTCACCAAAGAACGTGGCACCGCTTTATTGTTCATCACCCACGATCTTGGACTCATC
GCGCGCACCTGCGAACGCTTATTGGTGATGAAATCCGGCGAAACCGTAGAACGCGGCGAC
AGCGAGGCAATTCTTCGCTCCCCCGCCCATTCGTATACCCAACAGCTCCTTGATGCTTCA
ATCCTTGACCAGCCAGAAATCGCCTCAGATTCTGGCGCGCCGGTAGTGATTGATGTGGAG
GAGGCGTCGAAAAGCTTTAAAGAAACCACCGCCCTCCACAAGGTTTCATTGGCGGTGCGC
AAAGGTGACCTGCTTGGAATAGTCGGCGGATCAGGTTCCGGCAAAACGACTCTGCTGAAG
CTCATCGCCGGTTTGGATAAGCCCACAACCGGTACCGTTGCGGTAACCGGTGGTGTGCAG
ATGGTGTTTCAGGATCCCCAATCAAGCCTCAACCCACGGATGAAAATCAAAGACATTGTC
GCCGAACCACTGCTTGGTTGGAACGCGGCGGAGAAAACCACACGGGTTGCGGAAGTCATC
ACCCAAGTGGGACTGAGCCCCGATGTCTTAGATCGCTACCCCCACGAATTCTCCGGAGGA
CAGCGCCAACGAATCTCCATCGCGAGAGCCCTGGCCATCAAACCAGCGATCGTGCTTGCC
GACGAACCTGTCTCCGCCCTCGATGTGTCCGTACGTAAACAAGTACTGGATCTTCTCCAA
CAACTCGTCGAAGAATACGGCATCACCTTGGTGTTCGTCTCCCACGATCTGGCAGTGGTG
AGACACCTGTGCACAACGGTGTGGGTGATGGAACAGGGACGAGTCCTTGAGCAAGGGCCC
ATCGATTCGGTTTATGATCACCCAGAGAGCGAATACACCAAGGAGCTGCTTGATGCCGTT
CCGCGGTTGAGCCTT
>RXA02795-downstream
TAAACCAGCGCAGATGACAACGC
>RXA02808
TTTTACTTCGGCATCCTCCGAGTCCTTGCAGAAAGTGCTTCGCACTTCGGCATCGAGCCT
GTGGAAATGGCCCGCGCATCCATCACTGGGCAGCCCGTTCACATGCAAAGGCGGCTGGTC
CCAGCGATCGTCCTGCTGGTTTCCCTCGCCAACGTCAACCTTGGCGACCAGGACAAGAAG
GTTCTGTGGCGCGCCTGCATCGTGTCCATCGCGATGCTCGCCGTAGCCCTCTTCATCGGC
GTCGTGCCACTCAGCGCA
>RXA02808-downstream
TAAAATAGCTTTTCGACGCCAAA
>RXA02863-upstream
AGGGACTGCCCATTGCGGTGCGCGATGATCCCGAAACCAGCTCACTTCGCGTGATCCCGC
ATCCAAATCCCTTTTGATTGAAAGTTTGACTTAAAAACCC
>RXA02863
ATGAAAAAATCACTCATCGCCATTGTTGCCAGTGCGCTCGTGTTAAGCGGCTGCACCTCT
GATTCTTCTGACTCTTCCGGCACTTCCGGAACTGTGGAAACCACTTCGATTACAACCAGC
GTTGCCGCAGCTGACGGCGCATTCCCACGCACCGTCACACTCGACGATTCCTCCATCACC
TTAGAATCCAAACCAGAGCGCATCGCCGTACTCACCCCAGAGGCAGCATCCTTGGTTCTC
CCCATCACAGGCGCCGACCGCGTCGTGATGACCGCCGAAATGGACACCGCTGACGAAGAA
ACCGCAGCTCTGGCCTCCCAAGTGGAATACCAAGTCAAAAACGGTGGCAGCCTCGACCCC
GAACAAGTTGTCGCCGGCGACCCAGATTTGGTGATCGTCAGTGCGCGTTTCGATACCGAA
CAAGGCACCATCGACATTTTGGAAGGCCTCAACGTCCCCGTAGTTAACTTCGATTCAGAC
GCTTGGGGAGACATCGACGCCATCACCAAACACCTAGAAATTGTGGGTGAACTCGTCGGC
GAAGAAGACAAAGCCGCAGAAGCAATCGCAGAAATCGATGCAAACCGCATCGACATCGAC
AAGCCTGCCACCTCCCCCACTGTGCTCACTTTGATGCAACGCGGACCACGCCAAATGGTC
ATGCCAGAATCTGCCATGCTCAACGGCCTGATCCGCGAAGCCGGCGGCACTCCAGTGGTA
GATTCTCTCGGCGCGGTAGGCACCATCACTGCAGACCCAGAACAAGTTGTTGCGATGGCA
CCTGAGATCATCATCATTCAGGACTTCCAAGGTAAAGGCCGAGAGAACTTCGCTAATTTC
CTCTCCAACCCAGCGCTAGCCAACGTTCCCGCCATTGAAAACGACAAGATTTTCTACGCC
GACACTGTCACCACTGGAGTTACTGCAGGTACCGATATCACCACTGGTCTGCAGCAAGTG
GCAGAAATGCTGAGC
>RXA02863-downstream
TAGTTTTGAGATGTTGAAACTAG
>RXA02864-upstream
CTTGCAAACAGGCGTGGTGGTGGCGTTCATTGGCTCACCAATTTTCCTTTATTTACTGCT
CAGCATGCGCAAGCGACGCGGATTGGGGCTGTAAAAACTC
>RXA02864
ATGCCTCAATTAGTTGAAATTGGTGATCTCAACGTTGAATTCCCCTCTCGCCATGCAGTG
AAAAACGTGTCTTTTTCTGCACCTGCTGGAAAAGTCACCGCACTGATTGGCCCAAATGGT
GCTGGTAAAAGTACTGCCCTTTCGGCGATTGCAGGATTGGTTGAATCCACCGGCGAGGTA
ATGGTTGGTGGGAGTGGGGTTGCGTCGAAAAGCGCTAAAGCCCGAGCCCGCCTGCTCTCA
CTCGTGCCGCAAAACACCGAGTTGCGCATTGGTTTTAGTGCACGCGACGTTGTCGCGATG
GGCCGCTACCCGCATCGTGGCCGCTTCGCCGTGGAGACCGACGCAGATCGACGCGCCACC
GATGACGCCCTGCGCGCCATCAACGCGCTCGACATCGCCGAGCAGCCCGTCAACGAATTA
TCGGGCGGCCAGCAGCAGCTCATCCACATCGGCCGAGCGCTCGCCCAAGACACCGCCGTC
GTGCTTCTCGACGAGCCCGTCTCCGCCCTTGATCTACGGCACCAAGTTGAAGTCCTTCAA
CTCCTGCGCGCCCGAGCTAATTCCGGCACCACCGTGATCGTCGTCCTTCACGATCTCAAC
CACGTTGCCCGTTGGTGCGACCATGCAGTGTTGATGGCCGACGGCGAAGTTGTCTCCCAA
GGTGACATCCGCGAGGTGCTCGAACCTGCGACACTGTCCACCGTGTACGGACTGCCCATT
GCGGTGCGCGATGATCCCGAAACCAGCTCACTTCGCGTGATCCCGCATCCAAATCCCTTT
>RXA02864-downstream
TGATTGAAAGTTTGACTTAAAAA
>RXN00001-upstream
TGTCATAGGCAGCACTCTAGATGGCGCACAGTGACTCACTTCACTGTTTCTCACACTACG
GATCGTTGGGCACGTACCTGCCGATGGAGGAGATTCTGCA
>RXN00001
ATGGCAACCGTAACGTTCAAAGATGCTTCCCTAAGCTAGCCGGGAGCAAAGGAACCCACC
GTCAAGAAATTCAACCTGGAAATCGCCGATGGCGAGTTCCTCGTCCTGGTCGGCCCTTCC
GGCTGTGGTAAATCCACCACGCTGCGCATGCTGGCCGGTTTGGAAAACGTTACTGACGGT
GCCATTTTCATCGGAGACAAGGACGTTACCCACGTTGCACCGCGTGACCGTGACATCGCC
ATGGTTTTCCAGAACTATGCTCTCTACCCCCACATGACCGTGGGCGAGAACATGGGCTTC
GCACTGAAGATCGCCGGCAAGTCCCAAGACGAGATCAATAAGCGCGTCGACGAAGCCGCC
GCCACTTTGGGCCTGACCGAATTCTTGGAGCGCAAGCCGAAGGCCCTGTCCGGTGGTCAG
CGTCAGCGTGTGGCCATGGGCCGCGCCATTGTTCGCAACCCGCAGGTCTTTCTCATGGAT
GAGCCGCTGTGTAACCTCGATGCCAAGCTGCGTGTTCAGACCCGTACGCAGATTGCAGCC
CTGCAGCGCAAGCTTGGGGTTACCACCGTTTACGTCACCCACGACCAGACGGAGGCCTTG
ACCATGGGTGACCGCATCGCGGTGCTGAAGGATGGCTACCTGCAGCAGGTTGGCGCGCCC
CGAGAGCTTTATGACCGCCCCGCGAACGTCTTCGTCGCGGGCTTCATCGGCTCCCCAGCC
ATGAAGTTGGGCAGCTTCTCGGTCAAGGATGGTGACGCTACCTCTGGTGACGGTCGCATC
AAGCTTTCCCCGGAAACGCTCGCCGCCATGACGCCGGAGGATAATGGCGGCATCACCATT
GGTTTCCGCCCGGAGGCACTGGAGATCATTCCGGAAGGCGAGTCCACCGATGTTTCCATC
CCAATCAAGCTCGACTTCGTGGAGGAACTCGGTTCCGATTCCTTCCTCTACGGCAAGCTG
GTAGGCGAGGGCGACCTTGGATCCTCCAGCGAGGATGTCCCCGAGTCCGGCCAAATCGTC
GTCCGCGCTGCTCCGAACGCCGCGCCTGCTCCGGGCAGTGTTTTCCACGCACGCATCGTG
GAGGGCGGCCAGCACAACTTCTCGGCGTCGACTGGCAAGCGCCTCCCT
>RXN00001-downstream
TAAGCGCGCGTACCGGCTACCCC
>RXN00099-upstream
CTCTGGTGAAGAGGATGTTGACTCGGGAGATTCTTCCACTGATTCACTGATTAAGTGGTA
CCGCGCAAATAGGTAGTCGCTTGCTTATAGGGTCAGGGGC
>RXN00099
GTGAAGAATCCTCGCCTCATAGCACTGGCCGCTATCATCCTGACCTCGTTCAATCTGCGA
ACAGCTATTACTGCTTTAGCTCCGCTGGTTTCTGAGATTCGGGATGATTTAGGGGTTAGT
GCTTCTCTTATTGGTGTGTTGGGCATGATCCCGACTGCTATGTTCGCGGATGCTGCGTTT
GCGCTTCCGTCGTTGAAGAGGAAGTTCACTACTTCCCAACTGTTGATGTTTGCCATGCTG
TTGACTGGTGCCGGTCAGATTATTCGTGTCGCTGGACCTGCTTCGCTGTTGATGGTGGGT
ACTGTGTTCGCGATGTTTGCGATCGGAGTTACCAATGTGTTGCTTCCGATTGCTGTTAGG
GAGTATTTTCCGCGTCACGTGGGTGGAATGTCGACAACTTATCTGGTGTCGTTCCAGATT
GTTGAGGCACTTGCTCCGACGCTTGCCGTGCCGATTTCTCAGTGGGCTACACATGTGGGG
TTGACCGGTTGGAGGGTGTGGGTCGGTTCGTGGGCGCTGCTGGGGTTGGTTGGGGCGATT
TGGTGGATTCCGCTGTTGAGTTTGCAGGGTGCCAGGGTTGTTGGGGCGCCGTCGAAGGTT
TCTCTTCCTGTGTGGAAGTCTTCGGTTGGTGTGGGGCTCGGGTTGATGTTTGGGTTTACT
TCGTTTGCGACGTATATCCTCATGGGTTTTATGCCGCAGATGGTAGGTGATCCTCAGCTC
GGTGCGGTGTTGTTAGGCTGGTGGTCAATTTTGGGATTGCCGCTGAACATTCTGGGACCG
TGGTTGGTGACGCGTTTCACTAACTGCTTCCCGATGGTTGTTATCGCCAGTGTCATGTTT
CTCATCGGTAATGGTGGGTTTTGTTTGGCTCCGGATGTTGCGCCGTGGTTGTGGGCGACG
TTGTCTGGTCTTGGTCCCCTTGCGTTCCCGATGGCGTTGACGCTCATTAATATTCGTGCT
GAAACTAGTGCTGGTGCTTCTGCGTTGAGTTCCTTCGGGCAGGGTTTGGGTTATACGATT
GCGTGTTTCGGTCCCTTGTTGACTGGTTTCATTGTCGATGCGACAGGCAGCTTCCGAACA
ATCTTTGTGCTTTTTGCGGTTGCAACACTCTTCGTTATTAGAGGCGGTTACTTTGCGACA
AGGCAGGTTTACGTCGAAAAGCTTTTAAATCGC
>RXN00099-downstream
TAGGATGGCGCTATGCCGCAAAG
>RXN00193
AAAGCTTTCTNCCAACGCGAAGGTTTCATCTCAGCGTTCGGTTTCACCGTCGTCGTGGTC
ATCGTCTCCGTGATCACAGTCAACATGTTCGCCTTCCTCTTGGCGTGGTTGCTGACCCGC
AAACTCCGCGGTACCAACTTTTTCCGCACAGTCTTCTTTATGCCGAACCTTATCGGCGGC
ATTGTGCTGGGTTATACCTGGCAGACCATGATCAACGCCGTGCTTTCGCACTATGCCACG
ACTATTAGCGCGGACTGGAAATTCGGCTACGCCGGCCTCATCATGCTACTTAACTGGCAG
CTCATCGGCTACATGATGATCATTTACATCGCCGGCCTGCAAAACGTCCCACCAGAGCTC
ATTGAGGCTGCCGAACTCGACGGCGTCAACAAGTGGGAGATGCTGCGGCACGTCACTATT
CCGATGGTCATGCCATCCATCACCATCTGCCTCTTTTTGACTTTGTCGAACTCCTTTAAG
CTCTTCGAGCAGAACCTGGCGCTGACCAACGGCGCTCCTGGGGGGCAAACTGAGATGGTG
GCGCTGAACATCATCAACACGCTGTTTAACCGTATGAATGTCGAGGGCGTCGGT
>RXN00378-upstream
ACCGTGAGCCTTATACTGTGAGGACATTAAAAGTGACACGTCTTTTTCTATCTTTTACAA
CGCAAGAAGGTTTATCGTGAGCACACCGGATTCTTGCTCG
>RXN00378
GTGGACAAGGCCGTAAACACTGCTATCTCTGACGCCAAAACAGCGGCGCTCAAGGCAGGT
GTTGGATTGAACCGAGCCACCGCCTCAGAAGAAGAGGAAGATTTAAGCTCAAGCATTAAG
GTTTCTTTGGCCTTTGAGCTCGAGGGGTTAAGCAATGCACCATCGTTGATGGTGGTGGAA
AAAGCCGTAGAGAAGATCCCCGGTGTATCCGCGGATCTGATTTACCCTTCACAAACTGCA
TGGATTACAGCAACTGATCGGGTACATCCCGAAACCCTCATTGAGGTGTTTGAGCAGTTC
GGCATCAAAGCACACCTTTCTAATTCATCGCTGCTGCGCAGGCATCAACAGCTCAGCGCG
GAAGTAAATAGGGAAGCACGCCTTGATCGTTACCGCTCCCGAATGGATGCCAAGCGAATC
TCGCCTCGTGTGCGAAGGCATAACCGACAAGAAATGGTACATGCGGTACGCGCTCGTGAA
AGTGGTTGGATTAAACGCAGGAATCACACCACCTCGCAGCATGAAGACCCAATGTCGGGC
GATGTGCTGTTCACCGCCCGCGCACTGATTACACCTAAGCGTTTGTGGGTGTCGTTGCCG
TTTGCGCTCATCGTATTGGCGTTATCGTTGAATCCTTCGTGGCAGTTTGATTATTGGCAG
TGGTTGTCCGCTGTGTTGGCTATTCCTGTGGTGGTGTGGGGTGCCTGGCCGTTTCACCGC
GCTGCAGCAGGCGGTATTCGTCGAGGAATTTCCGCTCTTGATGCGACCAGCTCAATCGCT
ATTGCTGCTGCATACGCGTGGTCTATCGCCATGCTGTTGTTTGAAACCCCAGGAGGTAAA
TCCTGGCGGTCATATCCGTCCTGGTTCGCTTTTGACCACGGCACGTTGACCCAAAACGAG
ATTTATTTTGATGTGGCCTGCGGAATCACCGTGTTGCTTCTTGCCGGACGGCTGCTGACA
AGGCGTCGAAGCCAATCCAGTTTGTTAGCGGAACTTGGTCGCCTCCAAATCGATCCACAG
CGCATTGTCACTGTGGTGCGTAAACACCGATTGAAGCGCGTAGTCCAGGAACTGAACATT
CCAGTGCAGGAAGTCCGTGTCAATGACGATGTGAAAGTTCCACCTAATACCACGATCCCT
GTGGATGGCACTGTCATCGGTGGCGGTTCGCGGATCGCAGCTAGCATCATCATGGGACAA
GACCAGCGTGATGTAAAAGTAAATGACAAAGTTTTCGCCGGCAGCCTCAACCTCGAATCC
GAAATCAAGGTTCGTGTTATTCGCACTGGTCACCGCACCCGCATCGCCGCGGTACATAGG
TGGGTTAAAGAAGCGACGTTGAAGGAAAACCGCCACAATAGGGCAGCGATCCGTTCGGCC
GGTAACCTTGTGCCCATCACGTTCACCCTTGCTGTGGTGGACTTGTGTCTGTGGGCACTG
ATCTCTGGAAACATCAACGCTGCATTTAGCACTACCTTGGCTGTCCTTGGGTGCGTGGCT
GCGGTGGCCTTAGCGTTGTCTGCTCCACTTGCCACGAGGAATTCCATGGAAGCTGCAGCA
CGACACGGTATTTTGGTCCGCTCTGGTGAAATTTTGCGAGTTCTCGATGATGTGGATACT
GCCGTATTTAATCGTGTGGGCACACTAACCGATGGCGAAATGACAGTGGAAACCGTCACA
GCAGACAAAGGCGAGGACCCAGAACTAGTGCTGCGTGTCGCCGGGGCGTTGGCCATGGAA
TCCCACCACGCGATTTCCAAAGCACTGGTGAAAGCATCCCGTGAAGCTCGTGATACCGGC
GCCGGTGGTGAAGATGTCCCACACTGGATTGAAGTAGGCAACGTGGAAATCACCGAAGCC
GGCTCATTCCAAGCAACCATCGAGCTGCCACTGATCAAACCATCTGGCGAAAAAATCATG
CGCACCACAGAAGCACTCCTGTGGCGACCACGATCCATGACAGAAGTCCGTGAGCACTTA
AGCCCCCGACTAGTGGCAGCAGCAACCTCAGGTGGCGCACCACTGATCGTGCGATGGAAA
GGCAAAGACCGCGGAGTTATCACTCTAAGTGACCACGTGAGATCAGATTCCTCCGATGCG
ATTATTGCGATTGAAGAACAAGGCATCGAGACCATGATGCTTTCACGTGATACTTACCCG
GTGGCACGTCGATACGCAGACAGCTTAGGCATCACCCACGTCTTGGCCGGCATCGCGCCG
GGCAAGAAAGCCCAGGTCGTCCGTGCAGTCCACACCCGCGGATCCACTGTCGCGATGATC
GGCGATGAATCAGTAATGGACTGTTTGAAAGTCGCTGACGTGGGTGTACTGATGGGCGTC
GATCGTCCCTCAGATCTGCGTGATGATTCCGATGACCCGGCAGCTGACGTTGTGGTCATG
CGCGAAGAGGTCATGAGCGTGCCGACGCTGTTTAAACTGGCTCGACGCTACGCCAAGTTG
GTCAATGGCAATATTGCTCTGGCCTGGATCTATAACGGTGTTGCCATGGTGCTTGCAGTG
TCTGGCTTGCTGCATCCAATGGCTGCGACCGTGGCTATGCTGGCGTCTTCGCTGCTTATT
GAATGGCGCTGGGGCAGGGCGGGCAAGTAC
>RXN00378-downstream
TAACCAGCAATTCCCAAGCCCAA
>RXN00412-upstream
GTTTTGACGAACACCACGTCGCGTACGGTTCCTCGGGGCGTTAAACTATTTGTCTTCCAG
GTTTTGTCCCCCGACTTTTGTACGAATCGAGGACACCGTC
>RXN00412
GTGTCACACACCGCGTCCACACCGACGCCAGAGGAATACTCCGCGCAGCAACCCAGCACC
CAGGGCACTCGCGTTGAGTTCCGCGGCATAACCAAAGTCTTTAGCAACAATAAATCTGCT
AAAACCACCGCGCTTGATAATGTCACTCTCACCGTAGAACCCGGTGAGGTAATCGGCATC
ATCGGTTACTCTGGCGCCGGCAAGTCCACTCTTGTCCGCCTCATCAATGGCCTTGACTCC
CCCACGAGCGGTTCGTTGCTGCTCAACGGCACGGACATCGTCGGAATGCCCGAGTCTAAG
CTGCGTAAACTGCGCAGTAATATCGGCATGATTTTCCAGCAGTTCAACCTGTTCCAGTCG
CGTACTGCGGCTGGAAATGTGGAGTACCCGCTGGAAGTTGCCAAGATGGACAAGGCAGCT
CGTAAAGCTCGCGTGCAAGAAATGCTCGAGTTCGTCGGCCTGGGCGACAAAGGCAAAAAC
TACCCCGAGCAGCTGTCGGGCGGCCAGAAGCAGCGCGTCGGCATTGCCCGTGCACTGGCC
ACCAATCCAACGCTTTTGCTTGCCGACGAAGCCACCTCCGCTTTGGACCCAGAAACCACC
CATGAAGTTCTGGAGCTGCTGCGCAAGGTAAACCGCGAACTGGGCATCACCATCGTTGTG
ATCACCCACGAAATGGAAGTTGTGCGTTCCATCGCAGACAAGGTTGCTGTGATGGAATCC
GGCAAAGTTGTGGAATACGGCAGCGTCTACGAGGTGTTCTCCAATCCACAAACACAGGTT
GCTCAAAAGTTCGTGGCCACCGCGCTGCGTAACACCCCAGACCAAGTGGAATCGGAAGAT
CTGCTTAGCCATGAGGGACGTCTGTTCACCATTGATCTGACTGAAACGTCCGGCTTCTTT
GCAGCAACCGCTCGTGCTGCCGAACAAGGTGCTTTTGTCAACATCGTTCACGGTGGCGTG
ACCACCTTGCAACGCCAATCATTTGGCAAAATGACTGTTCGACTCACCGGCAACACCGCT
GCGATTGAAGAGTTCTATCAAACCTTGACCAAGACCACGACCATCAAGGAGATCACCCGA
>RXN00412-downstream
TGAACGAGATGATCCTCGCAGCT
>RXN00431-upstream
TGGATCGTCCTCGCCTTCACATTCGTCCGCCTTGGCCTTGCTCTCCTCGCGATGAAGCAA
TGGCGATTCCGCGTCAGCTACTGGGTATAAGGAGCACCAC
>RXN00431
ATGGTATCCATCGATACATACAACGCCTGCGTCGACTTCCCCATCTTCGACGCCAAATCC
CGCTCCATGAAGAAAGCCTTCCTCGGCGCAGCCGGCGGAGCAATCGGGCGCAATCAAGAC
AACGTCGTAGTCGTCGAAGCGCTGAAGAACCTCAACCTGCACTTGCGCGAAGGTGACCGG
GTCGGACTCGTCGGCCACAACGGCGCCGGCAAATCCACCCTCCTGCGACTCCTCTCCGGC
ATCTACGAACCCACCCGCGGAAGCGCTGACATCCGTGGACGCGTCGCCCCCGTCTTCGAC
CTCGGCGTCGGCATGGATCCAGAAATCTCCGGCTACGAAAATATCATCATCCGCGGCCTC
TTCCTCGGTGAAACCCGCAAACAGATGAAAGGCAAAATGGAAGAAATCGCCGACTTCACC
GAACTCGGCGAATACCTCTCCATGCCTCTCCGAACCTACTCCACCGGCATGCGCATCCGC
GTAGCCCTCGGCGTGGTCACCTCCATCGAGCCCGAAATTCTGCTTCTTGATGAAGGCATC
GGCGCCGTCGACGCCGCCTTCATGGGCAAAGCCCGCGACCGCCTCCAAGCCCTCGTCGAA
CGATCCGGCATCCTCGTCTTCGCCTCCCACTCCAACGACTTCCTCGCCCAACTCTGCAAC
ACCGCACTCTGGGTCGACCACGGACAAATCCGCGAAGCGGGACTAGTTCCAGACGTGGTG
GAAGCCTACGAAGGCAAGGGCGCCGGCGACCACGTCCGCAGACTCCTCACCCGCATGGAA
GAAGAAAAG
>RXN00431-downstream
TAGCTCCTGCGTTTCGGGTTTGC
>RXN00444-upstream
TACCCAATGGCATTGACCACCACCGGTGAAGACAACGAGGTAGCGAAGGCTTTCGCAGAG
TTCCTCAGCAGCGATCGTGCCAAGGAGATCCTTGCCAGCT
>RXN00444
ATGGTTTTGGCACAAACTAAAAAGGCTCGTCGAAGCGAGAATCATATCCTCCCAGGGTGG
TTGCTCATCCCAGCCACCCTGGCCATGCTGCTGATCATTGGACCTATTTTTGCTTTGCTG
TTGCAGATCCCCTGGGATCGGTCTTGGGAGTTGCTTACCGCGCCGGAATCTTTAGGAACC
GCACGGTTATCTATCGGAACTGCTCTGTTTTCTACCGCGCTATGCGCAATTGTGGGTTTC
CCGCTAGCGTTGGCGCTGCATTTATATGAGCGTTCGCACCCCAGGGTGACATCAGTTTTG
ACGGTGCTGGTTTATGCGCCTTTGGTGTTGTCGCCGGTGGTGTCTGGTTTGGCGCTGACT
TTTCTGTGGGGCAGGCGTGGTTTTTTAGGTTCTTGGCTTGATCAGGTTGGATTGCCGATT
GCATTTACCACCACGGCTGTGGTGTTTGCCCAGGTGTTTGTAGCGTTGCCATTTTTCATT
TCCACTGTGACTACTGCACTGCGTGGCATTCCAAAACAGTTTGAGGAAATCGCAGCTACT
GAAGGCGCAACCCGCTGGGAGATGATGCACAAGATGATCATTCCGCTGGCGATGCCTGGA
ATTTTCACCGGTATGATTTTGGGATTCGCCAGGGCCTTGGGCGAGTATGGTGCGACACTG
ACTTTTGCTGGAAATATTGCAGGTGTTACCCGCACCATTCCGTTGCATATTGAGCTTGGT
TTGAGTTCCAATGACATGGATAAAGCCTTGGGAGCGGTGATTATGCTTTTGGCTGTCTAT
GTCCTCATCATTGGAGCCATCGGAGCGTTACGATTGTTTTCCAAGGTGAGAAAGGTT
>RXN00444-downstream
TAATTGATGTCTCGTTCGCCGGA
>RXN00466-upstream
TTTAAAAGCGCACTAAGAGCTCGTCAATTCTTTAAAACAAGCTGAGAATGTGAATAATAG
GATAGGTTAACCTGATTCGATTAGAAAACGGAGATTTGTC
>RXN00466
GTGCAATCCCGCCTGTCCAAAATCCTGCGCAGTAGCGTCGTAGGCGTTGCTGTCCTAGCC
CTGTTAGCTGGGTGTTCTAACAATGCAGATGACACCGACGCTGATTCAACATCCACGGGA
AACTCCGCTTTTCCTGTTTCGATTGAACACGAGTTCGGAACCACCACAATCGATGATGTA
CCCGAAAGAGTTGTCAGGCTTGGCGTTACCGACGCCGATATTGTCCTGGCATTGGGGACC
GTCCCAGTAGGCAACACCGGATACAAATTCTTCGAAAACGGATTGGGACCGTGGACTGAT
GAGTTAGTGGAAGGCAAAGAATTAACACTGCTTGACTCTGATTCCACACCAGATCTTGAA
CAAGTAGCAGCCCTGGAGCCAGACCTGATTATTGGAGTCTCTGGGGGGTTTGACGACGTT
GTATACGAGCAACTATCTGATATCGCACCGGTGGTCGCCCGTCCAGCGGGAACAGCTGCA
TACGCAGTAGCTCGCGAGGAAGCTACCAACCTTGTTGCCCGTGCGATGGGGCAATCAGAA
AAAGGACAAGAGCTCAATGAGGAAACAGATGCTCTGATCCAAGCTGCGCGTGATGAAAAT
CCTTCTTTTGACGGTAAAACAGGAACCGTCATCTTGCCATACCAGGGTAAATACGGTGCC
TACCTGCCAGGCGATGCACGGGGACAATTCCTCGATTCACTTGGCATTTCGCTGCCGGAA
GCAGTTCTTTCGCGAGACACCGGCGACAGCTTCTTTGTCGATGTCCCCGCTGAAAGCGTC
AAAGACGTAGACGGTGATGTTCTCCTCGTGCTTTCCAACGACGAAAATCTGGATATCACA
GCAGAGAATCCACTGTTTGAAACACTGAACGTTGTGCAAAAAGACGCAGTAATTGTGGCA
ACAACGGAAGAACGCGGGGCGATTACCTACAACTCAGTGCTGTCTGTTCCTTTTGCGTTG
GAACATCTCGCACCACGTATTGCTGAGGCTTTGAAG
>RXN00466-downstream
TAAAACTCAACTACTCGAGCACA
>RXN00523-upstream
TGGTGACTCGTCCGAGTGAAATTGCCGTGGGCATCATCATGCCGATCATTGGTGCGCCAC
TGTTTATTTGGATTATTCGTCGTCAGAAAGTCAAAGAGCT
>RXN00523
ATGAGCCTTAGCCATCAACTCAAGCGCCAGCGCGCATCGCGCAACTCCGGCAGGTGGCTG
ATTGTTGCGGCATTGGGCGTCGTCACGCTTGGTATTTTTGCTTTTTCTTTGATGTGGGGC
GAGGTGTTTTATGGCCCTGCTGAGGTGCTGAAAGTGTTGTCTGGACAGCAGGTTCCCGGC
GCGAGTTATTCCGTTGGCGTGTTGCGTTTGCCGCGCGCGGTGATGGGTTTGACTGCGGGT
TTGGCGTTTGGCGCGGCGGGCGTGATTTTTCAGACGGTGTTGCGTAATGAGTTGGCGTCG
CCGGATATTATCGGCATTTCTTCTGGCGCGTCGGCGGCGGGCGTAATTTGCATTGTGTTT
TTCGGGATGTCGCAGTCTGCAGTGTCGGCGATTTCTTTGTGTGCGTGCTTGGCTGTGGCG
TTGTTGATTTATCTGGTGGCGTATCGCGGTGGTTTTTCGGCCACGCGTCTGATTCTTACC
GGCATTGGTATTGCTGCGATGCTGAATTCATTAGTGTCGTATTCGCTGTCCAAGGCTGAT
TCTTGGGATCTGCCGACCGCGACGCGCTGGCTTACCGGCTCGCTCAATGGTGCGACGTGG
GATCGTGCGATGCCGCTGATTGTCACCACTGTGGTACTCATTCCGCTGCTGGTGGCTAAT
GCGCGCAATGTGGATCTTATGCGTTTGGGCAATGATTCCGCGGTGGGTTTGGGCGTTGCT
ACTAATCGCACGCGCGTCATTGCGATTATTGCCGCTGTTGCGCTCATCGCCGTTGCTACC
GCTGCATGCGGCCCGATCGCATTCGTGGCGTTTGTGTCTGGCCCCATTGCCGCGGGCATT
TTAGGCTCCGGCGGATCGCTCATCATCCCCTCCGCACTCATCGGCGGGTTGATCGTGCTC
ATCGCCGACCTAATTGGCCAATACTTCCTCGGCACCCGCTACCCCGTCGGAGTTGTCACC
GGCGCATTCGGCGCCCCATTCCTTATCTATTTACTCATTCGTTCCAACCGCGCGGGAGTA
ACCCTG
>RXN00523-downstream
TGACCACCAACGATCAACTATCC
>RXN00525-upstream
CCATCGTGTTTATTACTCACAACCCTGAGCTTGCTGATGAATCTGATGGGGTGGTCACCA
TGGTTGACGGGCGCATCATTGGGTCTGAGGTGAAACACTC
>RXN00525
ATGAGCCTTGCAGAATCAATTCTTTTGGCGCTCACCAGCCTGAGAAGCAACAAGATGCGT
GCATTGTTGACGCTGTTAGGAGTCATCATTGGTATCGCATCAGTCATCGGAATTTTGACG
ATTGGTAAAGCCCTGCAGGATCAAACTTTGAATAGTTTGGAAAGGTTGGGCGCGAATGAT
CTGTCGGCGCAGGTGGAGGAACGCCCGGACGAAGATTCCCCGGAACCCGATATGTTCGCT
TTTTCTGGGGCTGCAAACTCTAGTGGCAATCTGATTCCGGAAGAAACAGTTGATACGCTG
CGCGATCGTTTCGCAGGCAGCATGACGGGAATCAGCGTTGGCGGAATGGGTACGCAAGGC
ACTCTCATCGGCGACACCGCAGATCTTAAATGCGATGTCCTCGGCGTCAACGAGGATTAT
ATGTGGATGAATGGCGTCGAAATGAACTACGGCCGCGCCATCACGCAAGACGATGTTGCC
GGTGAGCGCCCCGTTGCGGTCATCGCCCCAGACACCTTTAATACGCTTTTCGACGCAAAC
CGCAACCTCGCTCTGGGGTCCGAAGTAGCTTTTGAACTCAACGGTCAAGAGACATTTTTG
CGGGTTATCGGTGTGTATAAAGAAGCCGCAGCAGGTGGACTTGTGGGAAGCAATCCAACC
GTCCACACCTACACCCCATATACGGTGGCCAATGACATGACCCACACGGAAGATGGATTG
AACACGTTAAGTATCCGTGCAGCTCAGGGCGTAGACCAGGATTCACTTAAGGGTTCACTG
CAAACCTACTTGGACGCGCTGTACGCCAACAATGACTGGCACCACGTTGCCATGTTGGAC
TTCCGTAAACAGATCGAAGAGTTCAACACCATTCTCGGCGCAATGAGTTTGGGTATCTCA
GCCATCGGCGGAATTTCCTTGCTTGTCGGTGGCATCGGAGTGATGAACATTATGTTGGTG
TCTGTCACCGAGCGAACCCGCGAAATCGGTGTCCGAAAAGCCCTCGGCGCTCGTCGACGT
GACATTCGCCTGCAATTCGTCGTTGAAGCCATGATCATTTGTTTCATCGGTGGCATCCTC
GGCGTGCTTTTGGGCGGCATTTTGGGATTGATCATGTCCAGCGCTATTGGCTACATTTCC
TTGCCACCACTGAGTGGAATCGTGATCGCCTTGGTATTTTCCATGGCTATCGGCCTGTTT
TTCGGCTACTACCCCGCCAACAAGGCAGCAAAGCTCGATCCAATTGACGCCTTGCGTTAT
GAG
>RXN00525-downstream
TAAAAGCCTCGTTTTTAAGGTAG
>RXN00702-upstream
TGGGGACGATGCCAGGATTCTTGACGCCCGGCTTGCCGAAGAACAAAGTGAGGGTCAAGC
GTCGAAAAGCAATAAATAGCCCAGAAAGGGCCGAAGTTTA
>RXN00702
ATGAGTGGTCCTTTTAGCGCGCGCACTGGGTGGTGGACGGAGCCCGTGCTGGAACTGGAA
AGCGTCGGTGCCTCGTATTATGACGATGAGCGCACGCTGGCGGCGCCGCAGATCAGCGAC
GTGAATCTGACGCTTTTTGAAGGCGAAATCCTGCTGGTTGTGGGGCGCACCGGCTCCGGC
AAATCGACGCTGCTGAACGCGATGTCCGGCGCGATGCCGCATGCGACCGGCGGCCGACTT
GATGGGGGCGTGCGCGTGGTCGGCCGGGATACGCGTGATTTCCCACCACGCATGCTTTCC
GACGTGGTCGGCGTCGTTGGGCAAGATCCGGCGGCAAGTTTTATCACCAACACGGTTGAA
GAAGAACTTGCCTACAGCATGGAGCAATTAGGGGTCCCACCTGCGGTCATGCGCAAGCGC
GTAGAGGAAACCCTTGATCTTTTAGGCATCGCGGAGCTGCGATACGTGCCATTGGCGGAA
CTATCTGGTGGTGAGCAGCAGCGCGTGGCGATTGGCGCGGTGCTGACCACTCGCCCCGCG
CTGATTATCTTGGATGAACCAACCAGCGCTTTGGACCCTAATGGTGCCGAGGATGTGCTG
GCAACCGTAACCAAGCTGGCTCATGACTTGGCGATGACCGTAGTGCTTGCTGAACACCGC
ATCGAGCGCGTACTGCAGTACGTGGACCGCGTGGCGCATGTGGGCGCTGATGGGCACGTC
ACTGTTGGGACGCCGGAAGAAATCATGGCTGATTCTGATGTGGCACCACCCATTGTGGAA
TTAGGACGCTGGGCTGGCTGGGCTCCCCTACCGCTATCGATCCGCGATGCACGCGCACAC
TCCGGTGACATGCGCAAACGCCTGTATCAGGGTGGTTTAGTGGTGAACAAATTACACAAC
CACGCTGTCCAGCCAGTTTTGATCGCCGAAGATATCATGGTTGATTTCCGCGAAATCCGT
GCCGTTGACGGCGTGAACTTGAATCTCAACTCGGGTGAAATTACCGTGCTCATGGGCCGA
AACGGCTGCGGAAAATCATCCCTGCTGTGGGCTTTACAAGGTTCAGGGACTAGAAATCAG
GGCTCGGTGCAGGTGCTTGATGAGGCCGCGGGATTTTCGTGGACAGAGCCCAAAACTTTA
AAGCCCGGCAAGCGGCGCAATCTTGTGTCCATGGTTCGGCAAACACCGACCGATATTTTG
TATGAATCAACCGTGCATGCAGAGCTGGCACGCTCTGATAAAGATGCCGCAGCACCCGCC
GGCACCACGCGGGAAATCCTGGATTCACTGGTCCCGAATATCCCGGACCATCTCCACCCA
CGTGATCTATCAGAAGGCCAAAAGCTCTCCCTCGCGCTGTCCATCGAACTCGCCGCAAAA
CCCCGCGTGGTATTTTTCGACGAACCCACCGGCGGCCTAGACTACGACGGCAAGAAATCC
CTCGCCGGCTCCTTCGAACAACTCGCAGACGACGGCGACGCCATTTTGGTGGTCACCCAC
GACGTGGAATTCTCTGCACTGTGCGCCGACCGAGTGTTGTTTATGGCCTCTGGAAAGATC
ATCTCCGATGGCACAGCCGTAGAAATCCTCGCCGCATCACCGGCTTACGCCCCACAAGTC
GCAAAAATCACCGCCGGCATCCAAGAGGAATCACACTGGCTCACAGTCTCGGCCGTGAAA
GGTGCGGTAGGGCATGGTGAAATCTCA
>RXN00702-downstream
TGATCAACGCCATCACACTCAAG
>RXN00726
AACGCGGGTCGCTTGTATGTGGATGGCGATCTCATTGGCTACCGAGAGCGCGATGGCGTG
CTGTACGAAATCTCTGAGAAGGACGCCGCGAAGCAGCGCTCCGATATCGGCATGGTGTTC
CAGAACTTCAACCTCTTCCCCCACCGCAGGGTGATCGAGAACATCATCGAAGCTCCCATC
CACGTGAAGAAGCAGCCCGAAAGCAAGGCCCGCGCACGTGCCATGGAGCTGCTTGAGCAG
GTCGGCCTCGCCCACAAGGCGGACGCCTACCCCGTCCAACTGTGGGGTGGTCAGCAGCAG
GGCGTTGCAATTGCCCGCGCCGTCGCCATGGAGCCAAAGCTCATGCTTTTCGACGAACCC
ACCAGCGCTTTGGACCCTGAACTCGTCGGTGAAGTCCTGCGAGTGATGAAACAGCTCGCC
GACGACGGCATGACCATGCTTGTTGTCACCCACGAAATGGGCTTCGCCCACGAAGTCGCC
GACCAGGTCGTGTTCATGGCCGATGGAGTTGTCGTTGAAGCCGGAACCGCCGAAGAAGTT
CTGGACAATCCAAAGGAACAGCGCACCAAAGACTTCCTGTCTTCTCTGCTC
>RXN00726-downstream
TAACCTTTTCGGGTCTTAAAAAA
>RXN00732
AATCACCTCCTCCTACTCCCCACGGTAAAGGCAGACATCATTGACAATGGTGTGGTCACA
GGTGACATCGGCTATATTTGGCACACCGGTGGAATCATGCTGGCCCTGACATTAGTCCAG
GTTGCCTGCGCTATCGCCGGTGTTTATTTCGGTTCCAAACTATCCATGAGAGTGGGCCGC
GATCTGCGTTCGGCGATCTTTGGCAAGGTAGTGAACTTCTCTGAGCGTGAGATGGGTCAG
TTTGGCGCACCGTCGCTGATCACCCGAAACACCAACGATGTGCAGCAGGTTCAGATGCTG
GTGCAGATGACCTCCACTTTGATGATTTCCGCCCCGATGCTGGCCATTGGTGGCATCATC
ATGGCGGTGCGTCAGGATCTTGGTTTGTCTTGGCTGATGGTGGTCAGTATTCCGGTGCTC
ATCATCGTGGTGGCGCTGATCATTGTGCGCATGGTTCCGTTGTTCCAAACCATGCAAAAG
CGCATTGACCGCATCAATCAGATTATACGCGAGCAGCTCACCGGTATCCGCGTGATCCGC
GCGTTCGTGCGTGAAGATGTGGAACGCGAACGATTCAGCACTGCTAGTAAAGATGTCGCT
GATATCGGCGTGCGCACGGGTAAGCTGATGGCGTTGATGTTCCCTGCCGTGATGCTGATC
ATGAACCTTTCTGCCGTTGCTGTGATTTGGTTTGGTGCTTTCCAGGTGGAATCCGGCGAG
ACGCAGATCGGTACGCTCTTTGCATTCTTGCAGTACATCATGCAGATCCTCATGGGCGTG
ATGATGGCAGCGTTCATGTTTGTGATGGTTCCGCGCGCTGCCGTTTCGGCTGATCGCATC
GGTGAGGTTCTGGAAACCACACCGTCTGTGCAGGCGCCAGAAACACGGGCGCAGCCGTCG
ACAAGCGCTGGCGAAATCGTGTTCAACAACGCGACTTTTGCCTACCCCGGCGCGGATGAC
CCCGTGTTAAATAATGTGAGCTTCCGCGTTGCGCCTGGTAGCACGACGGCGATCATCGGC
TCGACGGGTTCGGGTAAGACGACGTTGATCGGGCTGGTTCCTAGGCTTTTCGACGTCACC
GAAGGCGACGTTACCGTCGATGGCACCGATGTTCGTGAATTTGAGCCGCTGAAGCTGTGG
GATCGGATCGGTCTTGTTCCGCAGAAGTCGTTCCTGTTTTCTGGAACGATCGCCAGCAAC
CTGCGTTATGGCAATGAAGATGCCACGGAAACGCAGCTGTGGCAGGCGCTTGCAATTGCT
CAGGCGGCGGACTTTGTGCGTGAGATGCCAGAGGGTCTTGATTCTGAGATTGCTCAGGGT
GGAACCAATGTTTCTGGTGGTCAGCGCCAGCGACTAGCCATTGCCAGGGCGTTGTTGAAG
CAACCTGAGATCTATATTTTCGACGATTCTTTCTCCGCCCTCGATGTGAGCACAGACGCC
GCTCTTCGCCGAGCGCTGAGCACCAACCTGCCGGATGCAACCAAGTTGATTGTCGCCCAG
CGTGTCAGCACGATTCGAGATGCCGATCAGATTGTGGTGCTTGATAACGGCGAGGTTGTC
GGTATTGGAACGCACACGAATTTGCTGAAGACGTGCGGTACCTACCGTGAAATTGTTGAA
TCCCAAGAGACTGCGCAGGCGCAATCA
>RXN00732-downstream
TGAGTAATACTGCAGGCCCCCGC
>RXN00759-upstream
TCACCTTGAACACTTAAAAGATAACTTCATCCGGCGCTTTATTAGCTTGAAGCGCCCCGC
ACCATAATCCATTCCCCAGCAAGCAAGGACACCCACGCTC
>RXN00759
ATGCTTCGTTACGTCGGGCGACGTTTGCTCGAAATGATTCCGGTGTTTTTCGGAGCGACC
TTACTGATTTACGCCCTCGTGTTCGTCATGGCTGGTGACCCAGTGCAGGCATTGGGAGGT
GACCGCGGCCTAACCGAGGCTGCGGCCGAGAAAATCCGTCAAGAATACAATCTTGATAAA
CCCTTCATCGTTCAATACCTCCTGTACATCAAGGGCATCTTCGTCTTAGATTTTGGAACA
ACGTTCTCTGGTCAGCCAGTTATTGATGTGATGGCCAGGGCCTTCCCCGTCACCATCAAA
CTCGCCATCATGGCCCTGCTGTTTGAATCAATCCTCGGCATTATCTTTGGTGTCATCGCA
GGTATTCGCCGCGGAGGAATCTTCGACTCCACCGTGCTGGTCCTTTCTCTGATAGTCATC
GCAGTCCCCACCTTCGTCATTGGTTTCGTGCTGCAGTTCTTAGTCGGCGTGAAATGGGGC
TTACTGCCCGTCACCGTAGGTTCCAACACATCAATAACGGCGCTGATCATGCCGGCTGTC
GTACTGGGTGCAGTATCGTTCGCCTACGTTCTTCGCCTCACCAGACAATCCGTGAGCGAA
AACGTCCGCGCTGATTACGTTGGAACCGCTCGAGCAAAAGGGATGTCCGGATTGAACGTG
ATGAACCGCCATGTGCTTCGAAACTCACTGATTCCCGTTGCCACCTTCCTGGGCGCCGAT
CTCGGTGCACTGATGGGTGGAGCGATTGTCACCGAAGGTATCTTCGGCATGAACGGTGTC
GGTGGAACGCTCTACCAGGCCATTTTGAAAGGTGAACCCACCACGGTTGTCTCCATTGTC
ACTGTGCTGGTCATCGTCTACATCATCGCCAACCTTCTCGTGGACTTGATCTACGCCGTT
CTCGATCCGAGGATCCGCTATGCC
>RXN00759-downstream
TAATAATGAATTCCACACAAACC
>RXN00808-upstream
CGCGATGTCGCACCGGCACGTTAGAGTATTGAGCATGAGTCGATTGCTTAGAGCATTGAA
ATGGCTGTGGGGCACATCGTGGCCGCTGTATGCTGCGACG
>RXN00808
GTGCTCGGCACGAATGTGTTTGGTGCGCTCGCAGTAATGCTGTTTGTGCGCTTCCTCATT
CCGCAGCCAGATGCTTCAAATTTCAACGCTGAGATCTCGTATCTGCCAGCTGTTGGTTTC
GCATACCTGGCGTTCGCCATTGTCGCGGGCATGCTGGTGACATTTTTGATGTTCCGCCCG
GTGCTTGATTGGCAGCGAAGCCCTGAAGATCATGACCGAAATATGGTGCGCAACTTGGTT
ATGCGCATCCCCATCTACCAGGCAATTCTGTGCGCAGTGGTGTGGTTAATCGGCATTGCA
ATTGCAACGTTGATTTCGGCCAGTGTGTCTACCAGTTTGGCGCTGGTCGTGGCGTTTTCC
ACGTTGATGGCTGCCGCAATCGTCGTGCTGCTCACCTACCTTGAGGCTGAGCGTTTGGTG
CGTCCGGTTGCTGCGTCTGCCCTGGCGCGTCGATTTGAGGATTCCACGCTGGAACCACCT
GTGAGCCAGCGCTTGCGTATGACGTGGTTGCTGACGTTGGGCATTCCAGTGATGGGAATT
CTGCTGGTTATTTGGGGCTACTCGCAGGGCATTTTCGGGTCTGATGCCTGCGGAATTATG
CCTGCCATCGCAGCGCTCGCGTTTGCATCGTTGGTCACGGGTTACCTGGGCAACCGGCTT
GTGGTGTCCTCTGTGGTGGATCCGATTCGGGAACTTCAGGAGGCCATCAACAGGGTTCGT
CGTGGTGAAAACGATGTGGAGGTTGATATTTATGATGGCTCTGAGATCGGTGTGCTTCAG
GGTGGCTTCAATGAGATGATGCGTGGCCTGCGTGAACGTCAGCGCGTCCGTGACCTTTTC
GGTCGCTACGTGGGCGCTGAAGTGGCCAAGCGTGCGCTGGAGGAACGCCCCACTCTGGGT
GGCGAGGACCGTAAGGTTGCCGTGTTGTTTGTCGATGTCATCGGCTCCACTACCTTTGCC
GTCAACCACACTCCTGAAGAGGTTGTGGAGGCGCTCAATGAGTTCTTCGAGCACGTCGTG
GAGGTTGTGCACCGCAACAAGGGTGTTATCAACAAGTTCCAGGGTGACGCGGCGTTGGCG
ATTTTCGGCGCTCCCCTGCCCCTGTCTGATGCCACCGGTCATGCGCTTGCGGCTGCCCGT
GAGCTCCGCGCAGAGCTGAAAGATCTCCAGCTCAAGGCCGGAATTGGTGTGGCTGCTGGC
GATGTCGTTGCTGGTCATATCGGCGGTCACGCGAGGTTTGAGTACACTGTGATCGGCGAC
GCGGTGAACCAGGCTGCGCGCCTGACGGAGATCGCGAAAACGACCCCAGGCCGCACCGTC
ACCAACGCTTCCACGCTGCGTGAGGCCAACGAGGCGGAGCAGGCTCGCTGGACGCTCATG
AAGTCCGTGGAGCTGCGCGGACGTAGCCAGATGACGCAGATTGCGCGGCCTATTCGGCCG
ACGTTGGCGGATAGGTCC
>RXN00808-downstream
TAATACGCTTTTCGACGCAAAAA
>RXN00828-upstream
CGGTGATCACCGGGCCGAATGGCGCTGGAAAATCCACACTTGCGCTGACCATGGGTGGAT
TGCTTCCGCGAAAAGTGGGCAGCTGGAACTGTCTGACACG
>RXN00828
GTGCGCGGCGGCGTTAACACGCCCCCGCACAAGTGGCGTTCAGCTGATGTAGCTGCACGT
ATTGGCACTGTCTTTCAGGATCCAGAGCACCAATTTGTGGCGCGCACTGTGCGTGATGAG
GTAGAAATTGGGCCGAAAATCATGAAAGTCGATGCAAGCGAGCGGATCGAGGAGCTGCTT
GATCGTTTGCGCCTCCGCCACTTGGAAAACGCCAATCCGTTTACCTTGAGTGGTGGAGAA
AACCGCCGCCTATCTGTGGCGACAGCCTTGGTGGCAGCACCGAAACTTCTCATTTTGGAT
GAGCCTACGTTTGGCCAAGATCCCGAGACCTTCACAGAGCTGGTGACGATGTTGCGTGAA
TTAACAGACAACGGAATCAGCATTGTGTCGGTAACCCATGATCCTGATTTCATCGCAGCG
GTGGGCGATCACCACATTGAGGTGAGCGCGAAG
>RXN00828-downstream
TGAACCTGCTGATCAAAATTAAT
>RXN00832-upstream
GAGATTGTGCTAGGTTCTGATGAGGCTTCGGGACGACCCGAAGAAATCTATGACAGCCTG
GGAACGGCCCAGAGTTCTTAAGAAAGTTTGACTAGAGAAC
>RXN00832
ATGCCGTTTTCTTGGCTAAAACCAATTGATTATGCCCGCATCTTTGTCGGCTGGGCATCG
ATTTTTATCATCCCCCTCATCACACTGCCATCAATTATTGAGTTGGCGCTGATCGTGGCA
GTCATCCTATTCTGCGCATTTGGCGTGGTGAAGATGGCGGAGCGTTTGGCTCATATTTTG
GGTGATCCTTTTGGATCGTTGATCCTTACCTTGTCGATCGTGATCATTGAAGTGATTTTG
ATCTGTGCGGTGATGCTGGGGCCTGCTGATTCAACCACTGCTGGTCGGGATTCCGTGATG
GCAGTGTCCATGATCATCATGGGTTTGGTCGTGGGATTGTGCCTACTCATTGGTGGTTTA
AGGCATGGAAGCATGCCACACAATGGGGTGGGAACTCCGACCTACTTGGTGCTGATCGCA
ACTTTTTCCGTAATCGCCTTTGCGGTTCCAGCTTTCAGGGGAGAATACTCCACTGGGCAG
GCACTTGTTATTTCAACACTGACAGCAGTGGTGTACGGGTTCTTCCTGTTTCGCCAAATG
GGTGCCCAAGCTGGTGAATTTCAAGAGGTCGAGGTCGCAGAAAAGGCAGACGACGCAGCA
AAATGGGAGGTCCCATTTAGAGGCTTAATCTTGATTATCACTGTGCTCCGCATCGTGTTG
CTGTCCCATGACATGGCCACGGTGATGGATGAAGTCCTGGCAAGCCTTGGTGCACCCGTA
GCAATGGCTGGATTAATTATTGCCACCATTGTCTTCTTGCCAGAGACCATCACCTCCTTG
AAAGCTGCGTGGACAGGAGAGATTCAGCGAGTAAGCAACCTCGCGCATGGAGCCCAAGTA
TCAACGGTGGGGCTGACAATCCCAGCTGTTCTAGTGATCGGCGTGATCACAGGTCAAGAT
GTAGTTTTGGGGGAGACCCCGATCAACTTGTTGCTGCTGGGAACCACCATTGCGGTGACA
GCCATTGCGTTTAGCTCCAAGAAAGTCAGTGCTGTGCATGGCTCGGTGCTGCTCATGCTT
TTCGGTGTTTACATGATGAGCATGTTCGCC
>RXN00832-downstream
TGATTTAGGTAGCCTGGTGGGAA
>RXN00934-upstream
CCAACCCCTGTGGTTTGGTGATTTGGATCCGGAGCGTCTCAAGCGCTCTAGGGAGCAGAC
AAATGTTCACAAACCGGTGGCATTACAGGAGGACAATTAG
>RXN00934
GTGCGAATTGGAATGGTCTGCCCGTACTCCTTCGATGAGCCGGGCGGTGTTCAAGCGCAT
ATCCTTGACTTAGCGCGAACCTTCATTGCCCAAGGCCATGAGGTTCAGGTGCTTGGTCCG
TGTAGTGCGGATACGCAGGTGCCCGATTTCGTGGTGCGCGGTGGTGGCAGCATCCCGATT
CCGTACAATGGCTCGGTTGCCCGCTTGAGCTTTGGGCCGAAAATGTTCAAGGCCGTGCGC
ACGTTCCTCCGCGAAGGCAACTTCGATGTGCTGCATATCCATGAACCGAATTCACCAAGT
TTTTCCATGGCGGCGCTACGCTTTGCGGAAGGCCCCATCGTTGCTACTTACCACGCCTCC
AGTAGCGGATCGAAGCTGCTCAAGGCTTTCTTACCAGTGCTTTCGCCCATGCTGGAGAAA
GTGCGCGCAGGCATCGCCGTGTCTGAAATGGCTCGGCGCTGGCAGGTGGAGCAAGTCGGC
GGCGATCCGGTGGTGATCCCCAACGGGGTAGAGACCTCGATGTTCAAAGCCGCGCGCCAA
ATCGAACCGAATGATCCTGTAGAGATCGTCTTTTTGGGTCGCGTCGATGAGTGCCGCAAA
GGCCTCGACATCGTGCTGCGCGCTCTGACCAGGCTGGATCGCCCGTTTACCTGCACGGTC
ATTGGCGGCGGCACCCCGCGAGAAGTCGCCGGCATCAACTTTGTGGGCCGCGTCAGCGAT
GAGGAAAAGGCAGCAATCTTAGGTGGCGCAGACATCTATGTCGCACCCAACACCGGCGGC
GAAAGCTTCGGCATCGTGCTAGTTGAAGCGATGGCGGGGGGATGCGCTGTCGTCGCCAGC
GACCTAGAAGCGTTCTCCCTGGTCACCGATTCTGAAGCCGCACAGCCAGCGGGCGTGCTA
TTTAAAACCGGCTCAGACGCCGACCTAGCCAAAAAACTTCAAGCGCTTATCGACGACCCC
TCCTCCCGTTCCACGCTTATCGCCGCGGGGCTAAAGCGCGCAAACGCCTACGACTGGTGG
ACAGTATCGACCCAGGTCATGGCAGTCTATGAAACCATTGCGATCGACAAAGTGAGGCTT
GGA
>RXN00934-downstream
TGACCCTTGTTTACCTCCTCATC
>RXN00939-upstream
GAATTCCACCCTGGACAAAGATCATCCCACCGTGTCGAAGACGCCCAGG
>RXN00939
ATGACAAGGCAAAAAACCCAGCCGTTCCTGGAGAAATTCTCGAAGTACTACACCCCCGGC
GTCATGATCGCCGCCGTGGCCGTCGGCCTGATCACGCTGAACGTTGAACTGGCCCTGACC
CTGCTGGTCATCGGGTGCCCGGGTGCCCTGGTCATCTCGATCCCGGTCTCGATCGTCGCC
GGTATCGGCCGCTCCGCCAAGGACGGCGTCCTGATCAAGGGCGGGGAATACGTGGAGACC
TCCGCGAAGGTCGACACCGTAGTCGTCGACAAGACCGGCACCCTGACCAACGGCCGCCCC
GAGCTGACCAACGTCGACGTCCTTGACCCCGCCTACTCGGACGATGAGGTGCTCACCCTG
GCCGCCCGCGCGGAAACCGCCTCCGAGCACCCCCTGGCCGAGGCCATCATCCGCGGCGCG
GAGAACAGGGGCTTGACCGTGGCGATGGTAGAAAAGGCCGAACCGGTCGCCGGCCGCGGC
ATCCGGGCTGACGTGGACGGTGCCACCGTGGCCGTGGGCTCAGCCGACCTGCTCGATCAC
ACCCCGGATAACACCCGCATTCTCGAGCTCAACGAACAGGGCAGGACCGCCATGTACGTC
GGCATCAACGGCAAGGCCGTGGGCATCGTCGCTGTGGCCGACACCATCCGAGATGATGCC
CCGGCCGCGATCAGGTCCCTGCACAATAAGGGAATCCGCGTGGTCATGGCCACCGGTGAT
GCCGAACGCGTCGCCCGCAACGTCGCCGCCGAGCTCGGTGTCGATGAGGTGAGGGCAGAA
CTGATGCCTGAGGACAAGCTCGAGATCGTCAAGGAGCTGCAGGCGCAGGGCCGGGTCGTG
GCCATGGTTGGCGACGGTGTCAATGACACCCCGGCACTGGCCACCGCGGACATCGGTGTG
GCGATGGGTGCGGCCGGTTCGCCTGCCGCCATCGAGACCGCCGATATCGCCCTGATGGCC
GACAAGCTGCCGCGGCTGCCCTACGCCCTGGGTCTGGCCCAGCGCACGGTGCGCACCATG
CGGGTCAACATCGGCATCGCCCTGCTCACTGTCACGATCCTGCTGGCCGGTGTCCTGCTC
GGTGGAGTGACCATGTCGATTGGCATGCTCGTCCACGAGGCCTCCGTCCTGCTGGTCATC
GCGATTGCGATGCTCCTGCTGCGCCCCACCCTGAAGGAAGACAAGGACAAGGCAGACGTC
AGTACTGCTGACGCCGCGAAGGAGACGCTGAGCGCC
>RXN00939-downstream
TAACGACACAATCGCCACAGCCA
>RXN00960
ATGGCTCGGCATTGTTGCAGCAATCGCTACGCGTCCACCGTCTTCTCCGGTCTGATCGCC
TACGGAGCATCCCAAGCGCTCTACCCATGGCTGCTGAAAGACCACCAAAGCGTCACCGAA
ATCGACCTTGATGCAGGTGCCCTGCAGCCCTACTTCAACATCGAGATGCCACCACCATTT
GAAGTGATGACCGCACTGCTGCTGGCATTCTGCCTCGGCCTGGGCATGGCTGTAATTAAA
TCAGACACCCTGTTCAAGGTAACCCGCGAACTCGAGCGCGTAGTCATGAAGACCATCACC
GCCTTTGTCATCCCACTGCTGCCACTCTTCATCTTCGGCATCTTCCTCGGCATGGGCATG
AACGGTGGCCTCCTGGAGATCATGTCCGCCTTTGGCAAGGTACTGATTCTCGCCGTCGTG
GGAACCCTGCTCTTCCTAGCCATCCAGTTCATTATCGCTGGTGCAGTATCCAAGAAGAAC
CCATGGAAACTGTTCAAAAACATGCTCCCTGCATACTTCACTGCACTGGGCACTTCCTCT
TCAGCGGCAACCATCCCAGTGACCTACCAGCAGACCCTGAAAAACGATGTTGATGTCAAC
GTCGCAGGCTTTGTTGTCCCACTGTGCGCCACCATCCACCTAGCTGGATCGATGATGAAG
ATCGGCCTCTTCACCTTCGCTGTTGTCTTCATGTACGACATGGAAGTAGGCGTCGGCCTC
TCCATCGGATTCCTCCTCATGCTGGGCATCACCATGATCGCCGCACCAGGCGTTCCCGGC
GGAGCCATCATGGCAGCAACCGGCATGCTGGCCTCCATGCTCGGATTCAACACCGAACAA
GTCGCCCTCATGATCGCCGCTTACATCGCGATTGACTCCTTCGGCACCGCAGCAAACGTC
ACCGGCGACGGCGCAATCGCAGTCATCGTGAACAAATTCGCCAAGGGCCAGCTGCACACC
ACTTCGCCAGATGAAATCGAAGAAGACGACCGCGTTGCCTTCGACATCACTCCATCGGAT
GTGGAACATCACAAG
>RXN00960-downstream
TAGAAACCCGCATTTTCTGTAGT
>RXN00980-upstream
AGAGAGAAAGGGAGAAATCATGAAAACGTGGAAGACCTGGGGGGTCGTCGGAGCTTGAGG
CCTCTTGATTATTTTGTCGTGGTTGAGTTCATCGAGCCCG
>RXN00980
ATGCTGGCAGATGCATTCATGATCGCGGCTGCAATTGTTGGAGGTTGGCCGATCGCGCAG
TCTGCATATCAAGCACTTCGCATTCGAATGGTGTCGATTGACTTACTGGTCGTTGTGGCT
GCCGTTGGTGCCATGTTCATCAACAACTATTGGGAGTCTGGGGCGGTGACGTTCCTCTTT
GCCCTTGGCAAGGCACTGGAACGCGCGACAATGAACCGCACACGAAAAGCACTATCGGAT
CTGGTGGATGCAGCTCCAGAAACTGCAAGAAGGCTCAACGCGGATGACTCAACAGAGGTA
GTTGAGCTGTGGGAGCTTGAGCCCGGTGACATCGTCTTGGTACGCAATGGCGAACAAATT
CCCGTCGATGGAAACGTGATTGCGGGTGTCGGTGGAATTGATGAATCCAACATCACGGGT
GAATCAATGCCGGCTGAAAAGGGTCAAGGCTCTGATGTGTATGCAGGAACCTGGCTGCGA
TCTGGTGTTTTGAGAGTCGAGGCAACAGGAATTGGTTCAGACTCAACTTTGGCAAAAATC
ATTCACCGCGTTGAAGACGCCCAGGATGACAAAGCCGGCACACAAACATTCTTAGAGAAA
TTCTCTAAGTGGTACACCCCGGGCGTCATGATCGGCGGCGCAGTGGTGGGACTTATCACC
TGGGACGTAGAACTAGCACTGACGCTCTTAGTGATCGGCTGCCCCGGCGCGTTGGTTATC
TCCATCCCGGTGTCCATCGTCGCAGGCATCGGCCGTGGTGCACGCGATGGCGTGCTGATC
AAGGGTGGAGAATACCTAGAAACCGCGGCGAAAGTCGACGTCGTTGTCGTGGACAAAACT
GGAACGCTGACGACCGGCCGCCCAGAACTCACAGACGTAGAAGTCATCGAGCCCGCCTAC
AGCCAGGGCGAGGTGCTGGAGCTCGCCGCGCGCGCCGAGACGGCTTGAGAACATCCGCTT
GCCGAGGCCATCATGCGTGGTGCCCAGGATCGGGGGCTGTCCACAAGATTGGTGGAAGCA
GCTGAAAACATCACCGGCCGAGGCATTATCGCAAATGTTGATGGACAGGCAGTTGCTGTT
GGATCTGCTGAGTTACTTGATCATGAACCAGACTCGACCAGGATCCTGGAGCTAAATGCC
GAAGGAAAGACCGCGATGTTTGTCGGAGTGAACGGACACGCCATTGGAATCGTGGCCGTC
GCCGACGCCGTTCGTTCAGATTCTGCCTCAGCAATCGAATCGCTGCATAAGGCGGGCATT
CAAGTTGTCATGGCGACTGGCGACGCTCACCGCGTTGCACAAAACGTGGCCTCCAAGCTG
GGAGTGGATGAAGTCTACTCAGAGCTACTCCCTGAACAGAAATTAGAACTGGTGCGTGAT
CTGCAAGCTGCCGGCAAAAGGGTCGCGATGGTGGGTGACGGAGTCAACGACACCCCAGCA
TTGGCAGCTGCTGATATCGGAGTAGCGATGGGCGTGGCAGGTTCCCCTGCAGCCATTGAA
ACCGCTGATATCGCACTCATGGCGGATCGTCTCCCACGGCTGGCACATGCAGTGACCTTG
GCAAAACGCACCGTAAGAACCATGCGCATCAATATTCTGATTGCGTTGGCTACCGTGATG
GTGTTACTAGCTGGCGTCCTATTTGGCGGAGTTACCATGTCGGTTGGCATGCTCGTTCAC
GAAGGAAGCGTGCTGCTTGTTATCAGCATCGCCATGCTGTTGCTGCGTCCAACACTTAAA
GAAGATGCTGCGCAAGCAAGTGATATTAAACGCTCGGAAATACAACAGATCGCA
>RXN00980-downstream
TAACCAATGGCTGGGTACTGATG
>RXN01000-upstream
CTTTCTATGCCTACGCGGATGTTTCCGTGATCATTCTGGAAATGCTCATCGTGGTGATTG
TCATTGAAGTAATCTCCAACGCACTTCGAAAGAGGCTGGT
>RXN01000
ATGAGCACCTTAACCTCTCACCGCACAGTACCGGCCCCCAGCTCTCCCCCGGCGCGCCCC
AACAAACTGGCGCGCAATATCGTTGCAATTGTCGCTGCGCTGATTGTCCTTATAGCTACC
GGCACGCTCAAGATCGAGTGGAATGAGCTTCCGCAGATGCCCGCGCAGGTGTGGCATTAC
TTAGAGCTGATGTTTAGCGATCCCGATTGGTCGAAGTTTGGCCGCGCCGTCCAGGAAATG
TGGCGTTCCATCGCCATGGCGTGGTTGGGTGCCATTTTATGCGTGGTGGTCTCTGTCCCT
CTGGGAATGTTGGCTGCCCGCGGGGTGGGACCTTATTGGCTGCGTACCGTTTTACGGTTC
GTGTTCGGGGTGATTCGTGCGTTCCCCGAAGTGGTTATCGCAATTATTTTGCTAACTGTC
ACCGGCCTAACTCCTTTTACTGGTGCGCTCGCATTGGGTATCTCCGGTATTGGACAACAG
GCAAAGTGGACCTATGAAGCCATTGAGTCCACTCCCACCGGCCCGTCAGAGGCAGTGCGT
GCAGCGGGTGGAACTACGCCGGAGGTTCTGCGGTGGGCGTTGTGGCCACAGGTTGCGCCA
TCCATTGCATCTTTTGCCCTGTACCGCTTTGAGATCAACATGCGTACCTCTGCGGTATTG
GGCATCGTTGGTGCAGGTGGTATCGGTAGTATGGTTGCCAATTACACCAACTACAGGCAG
TGGGACACCGTGGGCATGCTGCTCATCGTCGTGGTTGTCGCAACGATGATCGTCGATCTC
ATCTCCGGCACCATCCGCCGGCGCATCATGAAGGGGGCTAGTGACGGTGTCGTGGCACCA
AGCAAC
>RXN01000-downstream
TGACGCTCGACCAAGCATCCGCA
>RXN01002-upstream
GACTGCTGATACCGCACAGGATGAAATGACTCGTTACGGCGAGATGCTGAAGAAGTTCTC
GAACTAATTTCCCTGTTTCCAATACTCAAGGTGTGCGCAT
>RXN01002
ATGAATTCTGATGCTTCGGCTACCACCAACTCCTGGGCTATCAACTTCGACGATGTGTCG
GTGACGTATCCCAATGGGACGAAAGCCCTCGATGATGTTTCCCTCACCATCAATCCCGGT
GAGATGGTTGCCATCGTGGGTCTGTCAGGATCGGGTAAATCCACGCTGATTCGCACGATC
AACGGTCTTGTCGGGGCTACGGAAGGCAGCGTGACGGTGGGGCCGCATCAGATCAACACC
TTGAAGGGGAAAGCACTGCGTGATGCCCGTGGGCAGATCGGCATGATTTTCCAGGGGTTC
AAGCTGTCGGAACGCAGGAGTGTGTTCCAGAATGTTTTGGTGGGCCGCTTGGGGCACACA
GGGTGGTGGCGTAACCTCGTCGGGTTTCCCACGGAGCACGAGAAGCAGATTGCTTTTCAC
GGGTTGGAGTCCGTGGGCATTTTGCACAAAGTGTGGACGCGAGCTGGTGCTTTGTCGGGT
GGACAGAAACAGCGCGTTGCTATTGCGCGCGCCTTATGGCAAGATCCGTCTGTCATGCTG
GCAGATGAGCCTGTGGCAAGCCTTGATCCGCCAACCGCGCATTCCGTGATGCGCGATCTA
GAAAACATCAACAACGTGGAAGGCCTCACCGTGTTGGTGAACTTGCACTTGATTGATTTG
GCTCGTCAATACACCACAAGGCTTGTGGGTTTGCGTGCCGGCAAGCTGGTCTATGACGGT
CCTATCTCTGAGGGCACCGATAAAGACTTTGAAGCTATCTATGGTCGCCCCATCCAGGCT
AAAGACCTGCTAGGTGATCGCGCA
>RXN01002-downstream
TGACCACGCCTTCTTCTACACTT
>RXN01141-upstream
AAAGAACACTCGGTATGGCACCTGATTTAAGGATGCTGCAATCGTGACACATATCCTCTT
CGACAGCAGGCGTTTTCTGCAACTGGGCGCTTTTGCGTCC
>RXN01141
TTGAGCACCGCATTGGCCGGAGCGGCCCGCTACGTGACGTCGACAAGCAATAATGAACCT
GCGGATAACACTCCCCTGACCATTGGCTACGTGCCTATTGCGGGCTCGGCGCCGATTGCT
ATCGCAGATGCGCTAGGGCTGTTTAAGAAACACGGCGTGAATGTCACGTTGAAGAAGTAC
TCAGGGTGGTCCGACCTGTGGACCGCCTATGCAACAGAGCAGCTTGATGTTGCGCACATG
CTGTCGGCGATGACTGTGGCGATTAATGCTGGAGTGACCAACGCGTCGCGCCCGACGGAG
CTGTCGTTTACCCAGAACACCAATGGGCAAGCAATTACCTTGGCGTCAAAGCACTATGGT
TCCGTCAATTCAGCGGCGGATCTTAAAGGCATGGTGCTGGGAATTCCTTTTGAATATTCA
GTGCATGCGCTGCTCCTGCGCGATTATCTCGTCTCAAACGCAGTTGATCCCATCGGCGAT
CTTGAGCTTCGCCTGCTCCGACCTGCCGATATGGTCGCACAATTGAGAGTTGAGGGCATC
GATGGATTCATTGGGCCTGGGCCGTTTAATGAACGCGCCATCAGCAATGGCTCCGGCCGG
ATTTGGCTGCTGACCAAACAACTGTGGGACAAACATCCATGCTGCGCCGTGGCGATGGCC
AAAGAGTGGAAAGCTGAACACCCCACGGCGGCTCAGGGTGTGCTTAATGCGGTGGAGGAA
GCCTCCGCAATTTTGAGCAATCCGGCACAATTTGATTCCTCGGCACGCACGCTGTCGCAG
GAAAAATACCTCAACCAGCCTGCCACGTTGCTGGATGGACCGTCG
>RXN01141-downstream
TAATCATCGGCATCACCGGCTTA
>RXN01142-upstream
CTCCCCATCCACCGGCACAGTCAGCGCAGGCAACGAAGAAATTAAAGGACCAGGACCTGA
CCGAGGCATGGTTTTCCAAGACCACGCCCTCCTGCCCTGA
>RXN01142
TTGACCGCACGCGGCAACATCGACTTCGGGCTCCGCTCCGCGCGCCCCTCCTTGAGCAAA
ACCGAACGCGCCGACATCACCCGCACCCACCTCGAACAAGTAGGCCTCACCGACGCCGCC
GAACGGCGCCCCGCCCGCCTCTGCGGCGGCATGCAACAGCGAGTCGGCATCGCACGCGCC
TTCGCCATCGACCCAGCAATCATGCTTCTCGACGAAGCCTTCGGCGCCCTCGAGGGCCTC
AGCCGCCGCGAACTCCAGCTCCAAGTACTCAACATTTGGGAAGCCTCCCGCCGGACCGTC
GTCATGGTCACCCACGACGTCGACGAGGCCATCCTGCTCTCCGACCGAGTTGTCGTGATG
TGCAAGAGCGCCGAAGCCACCATCATCACCGATATTCCAGTGAATCTTCCCCGCCCCAGA
CACGAGCTGAGTGAAGACGCTTCTGTTGAAGCCGAGACCACAGCGCTGCGTAAGCGGATG
CTGCATCTGCTGGAGCAC
>RXN01142-downstream
TAGTTTCTAACACGTCTTTTAAA
>RXN01164-upstream
GCCGATCGTGATTGATGAAGACGAGATCCAAGCCTGGACTTCTGATCTCAAACCTGAAGA
TTTCACCAAAGGTAAAGATGAATCCGACGGTGAGAAATAA
>RXN01164
GTGACACTGTTTGTTCGGCTCGCCCTTGCTGCTGTGGGCGGGCTTTTTGTGTTTGCTTCC
AATGAACCGATCGGCTGGTTTGTCGCGGGAATTGTTGGCACTGCATTATTTTTTATCTCC
CTTGCGCCGTGGGATGTGGGAGTTCGCCAAAAGCGGCGGAAGAAGAATGAGCCAGTCCCA
TTTTTGCAACAGATGTCCACGGGCCCAACTGTTGTACAGGGCATGCTTTTAGGTTTTGTC
CATGGCCTGGTGACATATTTGCAGCTGTTGCCGTGGATCGGTGAGTTTGTTGGCTCACTG
CCTTATGTCGCGTTGTCAGTTGTCGAGGCGCTTTATTCCATTGCTCTTGGTGCTTTCGGC
GTGCTCATTGCGCGTTGGAGGGACTGGAAGGTTCTCCTGTTTCGGGCGATGTATGTGGCT
GTGGAGTATCTAAGAAGCTCGTGGCCATTTGATGGATTCGCGTGGGTTGGCCTGGCATGG
GGTCAAATTAACGGTCCGTTGGCTAATGTCGCAGCGCTTGGTGGGGTAGCGTTTGTGACT
TTTTCCACGGTGCTGGCTGCCGTGGGTGTGGCCATGGTGATTATTTCCAAGAAGCGACTG
GCCGGCGCAATCATCACCGCGAGTGTGATTGCTATCGGGGCGGTGTCATCCCTGTACGTT
GACCGCAATGGCACGAGCGATGAAAGCATCGAAGTAGCCGCAATTCAGGGCAATGTGGCT
CGGATGGGATTGGACTTCAATGCACAGCGCCGCGCGGTGCTGGCGAATCACGCACGGGAA
ACCCTCAAGCTGGATGAACAAGTGGATTTGGTGATCTGGCCGGAGAATTCCTCAGACGTC
AACCCATTTTCCGATGCACAAGCAAGAGCCATTATCGATGGAGCAGTGGAACATGTTCAG
GCAGCTATTTTGGTGGGCACGATCACCGTCGATGAGGTTGGTCCACGCAACACCATGCAG
GTATTTGATCCTGTTGAAGGTGCCGCGGAGTACCACAATAAGAAGTTCTTGCAGCCGTTT
GGTGAATACATGCCGTTTCGCGAATTCCTGAGAATTTTCTCGCCCTACGTTGATTCCGCT
GGAAACTTCCAGCCCGGTGATGGCACCGGCGTAGTGGAGATGAATGCTGCGAACTTAGGC
CGCGCTGTGACAGTGGGCGTGATGACGTGTTACGAGGTCATCTTCGACCGTGCTGGCCGC
GACGCCATCGCCAATGGGGCTGAATTTTTGACCACGCCCACCAACAACGCCACCTTCGGA
TTCACGGACATGACGTATCAGCAATTAGCAATGAGCAGGATGCGTGCCATCGAATTTGAT
AGGGCGGTGGTTGTTGCAGCTACATCGGGTGTTTCGGCTATCGTCAACCGTGATGGAAGC
ATTTCCCAAAAGACCCGAATTTTTGAGGCCGCCACCTTGACGGAATCCATTCCACTCAAG
GACACTGTCACCATCGCAGCGCGGGTTGGTTTCTATGTTGAATTACTGTTGGTTATCATT
GGTGTATTAGCTGGACTATTCGCCATTCGAATGAATAGCCGTTCAAAGTCTGCGAAAGGT
TCCGCTCGGGCCGCACAAGTTCGGGTTAAGAAGGTGCCTGCGAAAAAGGGAGCAACTAAT
CGTCGAAAAGTAAAA
>RXN01164-downstream
TAAAAACGTCCCGAAGGGACGAG
>RXN01168-upstream
CCGCACAAGTTCGGGTTAAGAAGGTGCCTGCGAAAAAGGCAGCAACTAATCGTCGAAAAG
TAAAATAAAAACGTCCCGAAGGGACGAGGAGGACAACACC
>RXN01168
ATGAGCAGTGAGGCAGTAGATGCTACGACGCTGGTGATTATTCCAACGTACAACGAGCTG
GAAAACCTTCCACTCATCGTGGATCGCGTGCGCACCGCAACCCCTGACGTTCACGTACTC
ATCGTGGACGACAACAGCCCAGACGGCACCGGGGAGCGCGCAGACAAGCTTGCTGCTGAC
GACGACCACATTTTTGTCCTCCACCGCGAAGGCAAAGGCGGCCTGTGCGCAGAGTACATG
GCTGGCTTCCAGTGGGGCCTGGAGCGCGACTACCAGGTCCTGTGCGAAATGGACGCCGAC
GGCTCCCACGCACCAGAACAGCTGCACCTGCTGCTCGCTGAGATCACCAATGGCGCTGAC
GTGGTCATCGGCTCGCGCTACGTGCCAGGCGGCCGCGTAGTCAACTGGCCCAAGAACCGT
TGGCTCTTGTCCAAGGGCGGCAACGTCTACATGAGCGTCGCGCTCGGCGCCGGCTTGACC
GATATGACCGCAGGGTACCGCGCTTTTGGACGTGAAGTGCTAGAAGCACTGCCGGTTGAT
GAGCTCTCCAACGCTGGGTACATTTTCCAAGTTGAGATTGCCTACCGTGCAGTTGAAGCC
GGATTCGATGTTCGTGAAGTTCCCATCACTTTCACCGAGCGTGAGATCGGCGAATCCAAG
CTGGACGGCAGCTTTGTCAAGGATTCCCTGGTCGAGGTAACCAAGTGGGGCCTCAAGCAC
CGCGGTGGCCAGGCCAAGGAACTGTCCAAGGAAATGGTGGGGCTGCTGAACTATGAGTGG
AAGCACTTCAAAAAGCGCAACACCTGGCTC
>RXN01168-downstream
TAAACTGCTTGCCGGTTAGTGAA
>RXN01285
CTCAACGTCACCATCCCCGACAACAGCTTCACCGCCATCATCGGCCCCAACGGCTGCGGC
AAATGCACGCTGCTCCGCGGTTTCTCCCGCGTGCTCAATCCGCAGCACGGCAAAGTGCTT
CTCGACGGTCGGCAACTCGATTGATTCAAGCCTAAAGAGATCGCCCGAGAACTAGGCCTG
CTGCCACAGACCTCCATCGCCCCAGAAGGCATGCGGGTTTACGATGTCATCGCGCGCGGG
CGCGCTGGCTACCAAAGCCTCATACAACAATGGCGCACCTCCGACGAAGACGCCGTCGCG
CAAGCGCTCGCCTCCACGAATCTGACCGAACTTGCAGCTCGCCTCGTCGATGAACTCTCC
GGTGGCCAGCGCCAACGAGTGTGGGTGGCCATGTTGCTCGCCCAGCAAACACCGATCATG
CTTCTCGACGAGCCCAGCACCTTCCTCGACATGGGCCACCAATACGAACTCTTGGAATTG
CTGCGCGCATTCAACGAGGCCGGGAAAACTGTGGTCAGTGTGCTTCACGATCTCAACCAA
GCCGCCCGCTACGCCGACCACCTCATCGTGATGAAAGATGGGCACGTACATGCCACGGGC
ACACCGGAGGAAGTCTTAACTGCCGAGATGGTTCAAGGAGTTTTTGGCCTGCCCTGCATC
ATCTCCCCAGACCCCGTCACAGGAACCCCGACCGTCGTTCCCCTCAGTCGGTCTCGCGCA
GGAGCT
>RXN01285-downstream
TAAGTAGGTACCCCTCCAACGGA
>RXN01298-upstream
CTTAAACGTCACCTTATTTATGCATTATGTTGGTTTCAGACTCGAACAATTCAATTAGAA
AACACTAATCGGACATTTAGGTCACATAACATTTCCGCTC
>RXN01298
GTGTCCACATTAATTTCTGAACCCGAGGTGGATAAGCTACGTAAACGTGCCAAGAGATCA
AGGCGGACAGAATGGTGGCTTGCCGCCGCACTTCTTGCCCCAAACTTGCTTCTCTTGGCC
ATCTTTACGTATCGGCCACTGTTAGATAACTTCCGGTTGTCCTTTTTCAACTGGAACATT
TCCTCGCCCACATCAACCTTCATTGGGTTTGATAACTACGTTGAGTTCTTCACTCGTAGT
GACACTCTCCAAGTTGTTTTAAACACCGTCATCTTCACGGCATGTGCTGTGATCGGATCG
ATGGTGCTCGGTTTGCTCCTGGCCATGTTGTTGGATCAGAAGCTTTTCGGCCGTAACTTT
GTGCGTTCGATGGTGTTTGCCCCGTTTGTGATTTCCGGTGCTGCCATTGGTGTTGCTTTC
GAGTTGGTTTTTGACCCTAATTTTGGTTTGGTTCAGGACTTGCTGGGACGCATCGGCGTT
GATTCGCCACAGTTCTACCAAAACCCTAACTGGGCATTGTTCATGGTGACGTTCACTTTC
GTGTGGAAGAACTTGGGCTACTCCTTTGTTATCTACCTGGCTGCATTGCAGGGGCTAAAC
AAGGATTTGTCTGAGGCCGCACCGGTGGATGGCGCGAGCGCGTGGACACGTTTTTGGAAG
GTTACTCTTCCGCAGCTTCGCCCAACCACGTTCTTCCTTTGTATTACTGTCACGCTGAAC
TGGGTTCAGGTCTTCGACATCATTCACACCATGACTCGTGGTGGCCCCTTGGGTAACGGT
ACGACCACCTTGGTTTACCAGGTGTACACCGAGACTTTCACCAACTATGGCGCGGGATAT
GGTGCAACAATCGCAACGATTTTGTTCCTGTTGCTGCTGATTATCACTGTTATCCAGGTT
CGATACATGGATAAGGAGAACAAGCAGAAA
>RXN01298-downstream
TGATCTCGACTGATAGAAACGTT
>RXN01323-upstream
CACGTGGTTTACGCCAGGCATGTTCCCGCGAAGGGTTGACCCATACCCCTAGGGGGTATA
CAGTGAGTCATGTAAACATACTCGCAGAAGGAGCGATCCC
>RXN01323
ATGGCTCAGACACCCGCCAAAATCCCGGCGGCACTGAATTTCATTGACGTCGACCTCGGC
GTTACCGGCATGACCTGCACTTCTTGCTCCGCCCGCGTCGAGCGCAAACTGAACAAGCTC
GACGGCGTTGAAGCAACCGTCAACTACGCGACGGAATCCGCACAGGTCAGCTACGACGCG
TCAAAGGTCAGCCCTGAACAGCTGATTAAGACTGTTGAGGACACCGGCTACGGTGCTTTC
ACGATGGCTTCCGCAGCTGCCGAATCAGAAGAGGACAACGCTCCAGGTGACAGGGGCGAG
TGCCGCATCGACGCAGCTCGCGAGCACGAAGCAGGCGACGTGAAACACCGCGTGATCGTC
TCTGCACTGTTGTCAGTTCCTGTGGTTTTGGTCAGCATGATCCCGGGGCTGCAATTCAAC
AACTGGCAGTGGGCCGTACTCAGTTTGGTCACCCCGATTTTCTTGTGGGGCGGTTCACCG
TTCCACAAGGCAACGTGGGCAAACCTGAAGCGCGGTTCCTTCACCATGAAGAGCCTGGTT
TCACTCGGCACGTCCGCTGCTGACCTGTGGTCCGTGTGGGCTTTGTTCATTGAAAATGCT
GGTCACCGTGGCATGAAGATGGAGATGCACCTGCTGCCGTCGGCCTGCACGATGGATGAG
ATTTACCTGGAAACCGTCGCGGTCGTTATTACGTTCCTGCTGCTTGGACGCTGGTTTGAG
ACAAAAGCTAAGGGCCAATGTTCGGAAGCTCTGCGCAAGCTGCTGGACATGGGCGCCAAA
GATGCAGTCGTGTTACGTGACGGCGCCGAAGTCCGCGTTCCTGTGAATCAGCTTAAACTC
GGCGACGTTTTCATCACCCGCCCCGGCGAGAAAATCGCCACCGACGGTGAAGTCGACGAA
GGTTCCTCCGCAGTCGACGAATCCATGCTCACCGGCGAATCCATCCCCGTTGAAGTCACC
AAGGGGTCCAAAGTTACCGGCGCAACGCTGAACAGTTCCGGCCGCCTCATGGTGAAAGTA
ACCCGCATCGGCGCCGACACCACCCTGTCGCAAATGGCTAAACTGGTCACGGACGCACAG
TCCAAAAAGGCCCCTGTCCAGCGTCTTGTTGACCAAATCTCGCAGGTTTTCGTTCCCGTT
GTCATCGTAATTGCTATTGCGACGCTGATCGCGCACGTCGTCTTCACCGACGCCGGCCTC
GCCCCAGCATTCACGGCAGCAGTCGCCGTCCTCATTATCGCCTGCCCTTGTGCCCTCGGC
CTGGCAACCCCAACCGCACTTCTGGTCGGAACGGGCCGCGGCGCGCAACTTGGTCTGTTG
ATCAAGGGCCCTGAAATCCTCGAATCCACCAAAAAAGTCGACACCATCGTCCTCGACAAA
ACCGGCACCGTCACCACCGGCACCATGTCCGTCACCGACGTCACCGCCATCAACTACAGC
GAAACCGAAATCCTCGAATTCGCTGCAGCCGTCGAGTCCGCCTCCGAACACCCCATCGCC
CAGGCAATCGCCAAGGCCGCCGAACACGAGCAAGTCACCGACTTCCAAAACACCGCAGGT
CAGGAAGTCACCGGTGTAGTCCGCGGACACGAGGTCCGCGTGGGCAGGCCTTCAAGCACG
GTTATCGACGCCCTCCTCCACCCCTTCCAACACGCCCAAAAAATCGGCGGAACCCCCGTA
GTCGTCACGATTGACGGCGTAGATTCCGGAATAATCACGGTCCGCGACACCGTCAAAGAC
ACCTCCGCCGAAGCAATCCGCGGACTCAAGGAACTGGGACTCACCCCAATCCTACTCACC
GGAGACAATGAAGGCGCAGCTAAATCCGTAGCCGCTGAAGTCGGCATCGACCAAGTCATC
GCCAACGTCCTCCCCCACGAAAAAGTCCAAAACGTAGAAGCCCTCCAAGCACAAGGCAAA
AACGTTGCGATGGTCGGCGACGGCGTCAACGATGCCGCAGCTCTTGCCCAAGCTGACCTC
GGACTCGCCATGGGAGCCGGCACCGACGTAGCCATCGAAGCCTCCGACATCACCCTCATG
AACAACGACCTCCGATCCGCAGTCGACGCCATCCGACTGTCCCGTAAAACCCTCGGCACC
ATCAAGGGAAACCTTTTCTGGGCTTTCGCCTACAATGTTGCACTAATCCCAGTAGCGGCG
ATCGGACTCCTCAACCCAATGCTTGCCGGCATTGCGATGGCCTTCAGTTCAGTTTTCGTC
GTCTCCAATTCCTTGCGTCTGCGAGGATTCAAAGCAAGGAGCAAC
>RXN01323-downstream
TAATGTCCAACAGCGAATGCCAC
>RXN01338
AAAACTTATACCCCAAATGCCTGGATGTTATTCATCCGCTCATTTGATGGCATCATCACT
GTCGCAGCCCTTGTTGCCATCGCAATACATCTCATTTTATGGCTGGCTCTAGATCTAGAT
GGCGTTGCTAAAAACTGGCCTTTAATAGCCATCGTTATCGTAGGTGGCATTGCGTTGATG
TGGGATGTGCTGAAATCAGCCATTAAAACTCGCGGTGGCGCGGATACTTTAGCAGCAGTC
TCCATCATTACTTCTGTGTTGTTAGGGGAGTGGTTGGTTGCCGCGATCATCGTGCTCATG
CTCTCTGGTGGTGAAGCGCTAGAAGAGGCAGCATCACGGCGAGCGAGTGGCACCTTGGAC
GCACTTGCCCGGCGCGCACCAAGTACAGCTCACCGCCTGTTGGGTGGAACCATTCTTGAT
GGAACCGAAGAGATCGCCGTGGAAGAGATCACGGTTGGTGATTTAGTGGCGGTGCTCCCG
CATGAACTTTGTCCCGTGGATGGTGAAATCGTGGCAGGCCACGGCACCATGGATGAGTCT
TATCTCACGGGTGAGCCCTATGTGGTGAGTAAATCTAAAGGTTCGCAAGCAATGTCGGGT
GCAGTCAATGGTGATACTCCGCTGACGATTGTTGCCACAAAGCTTGCCCATGATTCCAGA
TACGCCCAAATTGTTGGTGTACTCCATGAAGCAGAAAACAACCGCCCAGAAATGCGCAGG
ATGGCTGACCGTCTTGGCGCGTGGTATACGGTGATTGCACTTGCCCTCGGTGGTCTTGGC
TGGATTGTCTCCGGCGACCCAGTGAGGTTCTTGGCTGTTGTCGTTGTCGCCACCCCATGT
CCATTGCTCATTGCAGTGCCAGTGGCGATCATCGGTGCGATTTCTCTTGCGGCTCGTCGG
GGCATCATCGTGAAGAACCCTGGAATGCTGGAAAACGCTTCAGGAGTAAAGACAGTGATG
TTCGATAAGACTGGAACGCTCACCTATGGCAGGCCAGTGATTACTGATATCCACACTGCT
CCCGGAGTTGAGGAAGATACAGTCCTAGCTTTGGCTGCTTCAGTAGAGCGCTACTCCAGA
CACCCGTTGGCTGACGCGATTCGTGAGGGCGCAAAAGCCAGGGAACTTCATCTGCCTGAT
GTAGTGGAAGTATCGGAACGTCCAGGACAGGGACTAACCGGCACGGTGGGCGAGCACCTG
GTTCGAATAACCAATAGGCGCAGCACACTAGAAATTGATCCAGACAGCAAGAACTACATT
CCGGTGACAAGTTCCGGCATGGAATCTGTGGTGCTTGTTGATGATAAATATGCAGCACTC
ATTCGCGTCCGGGATGAACCTCGTGCATCTGCGAGTGAGTTCATCGCGCACTTGCCCAAG
AAGCACAAAGTGGACAAGCTCATGATTATCTCTGGTGATCGCGCATCTGAGGTTCGTTAC
CTTGCGGACAAGGTTGGCATTGATGAGGTACACGCAGAGGCCTCACCGGAAGACAAGCTG
AACATTGTTAATCGGCATAATGAGCACGGCGCCACCATGTTCTTAGGTGATGGAATCAAC
GATGCGCCAGCGATGGCCGTTGCCACCGTTGGTGTCGCGATGGGAGCAGACTCCGATGTC
ACGTCCGAAGCAGCAGATGCTGTGATTTTGGATTCTTCCCTGGAACGTCTCGACGATCTG
CTCCACATCAGTGCACGGATGCGTCGAATAGCGTTGCAATCTGCGGGCGGTGGCATGGCG
TTGAGTGTCATAGGAATGATCCTCGCGGTATTTGGATTCTTGACGCCACTGATGGGTGCG
ATCTTCCAAGAGGTCATTGACGTGCTGGCTATCCTCAATTCCGCTCGGGTCGCACTGCCA
CGCGGAGCGATTAGTGATTTTGATACGCAAGAAAAAGTTTCT
>RXN01338-downstream
TAGCAGGGTAACCTAAATGTCGT
>RXN01411-upstream
CTTATCGACGTCCCCATCCCCCTCGCCAATGCTTCGGCGAGGGGTTCTATTTATTGTGTG
TGCTAGCCTTTTCGCAATCGTTCAGCCCGCCCCGACGTCA
>RXN01411
ATGTTGGGAGTGGGCTGGCGCATTCCATTCCTGATGGCCGTGCCACTAGGGCTTATCGGC
TGGTGGATGGGCACCGGTGCCCAGGAAAATGTACGCCCCGCATCCGAACGCCCCGAAGCT
CCTATTAAGCAGGCATTGCGTACTGAGTGGAAGATGATGTTGCGGGTAGGTGGCTTTATC
TCTTGCACCGGTCTGAGCTTCTACATTTTCACCACGTACATGACCACTTTCCTGCGCAGC
ACCGTCGGACTGGAGGGCACGTTAGTGCTGGCTGGAAACATCATCGCTCTGAGCATGGCA
GCAATTGTGGCCCCATTTGTTGGCCGCGCAATTGATAAATTCCCCCGCCGGAACATCATG
GGTTTCGCTACCTTAAGCACAGTAATTATGGCGATCCCGGCCTACATCATTGCAGGTCAA
GGTACTTTGACTGCTTCTTTGATTGCGCAGGTAATGCTTGGAATCGGCGCGGTTACCGCT
AACTGCGTTACCTCAGTAATGATGGCCGAGGTCTTCGAAGAGGTCACCCGCGGTACTTCC
GCCGGCATTACCTACAACGTCACTTACGCAATCTTCGGCGGCTCGGCTCCATTTATCTCC
ACCGCATTGGTCTCCTGGACCGGCAGCCCGCTGGCCCCTGCGGTATACATGATCATCATT
GGGCTCTTCGCCTTCACCGCGTCCCGCTTCATTCCTGAAACCTCCCCAGTTTTTGTCACC
GCAACCCCGGCCATTAAGGCACCAAAGGTGCTGGTCAACCCGGGT
>RXN01411-downstream
TAAACCACGCTTTTCGACGAAAA
>RXN01808
CAGAGCCTCGCGTGTAAAGAACTCGCATGGATGCGGGGCGGTGCACCAGCGCGAACCTCA
AAGCCTGGATTCCGCCTTGAAGCCGCGGAAGCTTTGATCGCAGAAGTGCCAGCGCCACGC
GACAAAGTCGAGCTCATGGCATTTTCCAAGTCCAGGCAAGGCCGCGTTGTCATTGAACTT
GAAGACGCGACAGTAGCCAGCCCTGATGATCGCATCCTGGTAGAAGAGCTGACCTGGCGT
TTGGCTCCAGGAGAGGGCATCGGTCTTGTCGGCGTCAACGGGTCCGGCAAAACCACCCTG
CTGCGCACCCTTGCCGGCGAGCAGCCACTTCAGGCAGGCAAACGCATCGAAGGCCAAACC
GTCAAACTGGGATGGCTCCGCCAGGAACTCGATGACCTAGACGTCAGCCGCCGACTCATC
GACTGCGTTGAAGATGTCGCTTCCTACGTGATGATGGGCGACAAGCAGGTCTCCGCTTCC
CAATTGGCAGAACGCCTCGGATTCTCACCCAAGAGGCAACGCACCCCAGTTGGTGACCTG
TCCGGTGGTGAACGCCGCCGACTCCAACTCACCCGCGTGCTCATGGCCGAACCAAACGTG
CTGCTCCTCGACGAGCCCACCAACGACCTGGACATTGACACCCTCCAAGAGCTGGAATCC
CTTGTCGACGGATGGCCAGGCACCATGGTGGTTATCTCCCACGACCGTTACCTCATCGAA
CGCGTCACCGACTCCACCTGGGCACTCTTCGGCGATGGCAAGCTCACCAACCTGCCAGGC
GGAATTGAAGAGTACCTGCAGCGACGAGCAGCGATGGCCGCGGCCGAAGACAGTGGAGTG
CTGAACTTGGGTGCGGCCACGCAGGCTGGAACCTTTTCTGCTGCAACAGAGCAGGCTGCC
ACTTCTGTGGAAAGTTCCGGAATTTCTTCCCAAGAACGCCACCGCATCACCAAGGAAATG
AACGCCCTGGACCGCAAAATGGGCAAGCTTGACCAGCAAATGGACAAGCTTAATCAGCAG
CTCGCTGATGCAGCGGAGGCCATGGACACCATAAAGCTCACCGAGCTGGACACCAAGCTC
GGCGCAGTGCAGGAAGAACACGGCGAGCTGGAAATGCAGTGGCTGGAACTCGGCGAGGAA
ATCGAGGGC
>RXN01808-downstream
TAGTTCATGCCGTCGGCAGGCGA
>RXN01939-upstream
TGCTGTTCTACCCCGCAATGGCACTTGCACTAACCGTTTTGAGCTTCATCATGATGGGCG
ATGTCGTCCGCGACGCTCTGGATCCTAAGTCGAGGAAGCG
>RXN01939
ATGACCACCAACATCCCACAAACCCCCAACCACGAGGGTGAACAGCCACTGCTCGAGCTG
AAGGATCTAAAGATTTCCTTCACCTGCTCCACCGGTGTTGTCGACGCTGTCCGTGGCGCA
AACCTCACGATTTATCCTGGCCAATCTGTTGCCATCGTGGGTGAATCCGGTTCAGGTAAA
TCGACCAGGGCAATGTCGATCATCGGTCTGCTTCCAGGCACCGGCAAAGTGACCGAAGGT
TCCATCATGTTTGATGGCCAAGACATCACAGGCTTGAGTAACAAGCAGATGGAAAAGTAC
CGCGGTTGAGAAATCGGACTGGTGCGCCAGGATCCGATGACCAACTTGAACCCGGTGTGG
CGCATGGGCACCCAGGTCAAGGAATCCCTCCGAGCCAACCACGTGGTTCCAGGCTCAGAG
ATGGACAAGCGCGTGGCAGAAGTTCTGGCCGAGGCAGGTCTTCCTGATGCTGAGCGTCGC
GCAAAGCAGTACCCACATGAGTTCTCTGGCGGTATGCGCCAGCGCGCACTGATCGCCATT
GGTTTGGGGGCACGCCCGAAGCTCTTGATCGCCGACGAGCCCACCTCTGCGCTGGATGTC
ACCGTGCAGCGCCAAATCCTTGATCACCTTGAAACACTGACCAAGGATCTCGGCACCGCA
GTGCTATTTATTACCCACGACTTGGGGCTTGCCGCTGAGCGCGCGGAGCACCTCGTGGTG
ATGCACCGCGGACGCATCGTGGAGTCCGGGCCATCATTGAAGATTCTGCGCAATCCACAG
CACCCATATACCCAACGCTTGGTTAAGGCTGCGCCGTCTCTGGCTTCTGCACGTATTCAA
AGTGCGCAGGAACAAGGCATTGAATCTGCAGAACTGCTCTCTGCAACGGCCGTTGCTGAG
GGCACTATTCCAGAGATGGAAGAAAAAGTTATCGAGGTGAAAAACCTCACCCGCGAATTT
GATATCCGCGGTGCCCGTGGCGATAAGAAGAAGCTGAAGGCCGTTGATGATGTGTCCTTC
TTCGTACGTAAAGGCACCACCACCGCACTTGTGGGTGAATCCCGTTCGGGTAAATCCACC
GTGGCCAACATGGTGCTCkACCTTCTCGAGCCAACCAGCGGAGAGGTGCTCTACAACGGC
ACCGATCTTACGTCCTTGAGCCACAAGGAAATCTTCCAAATGCGACGCAAACTGCAGGTG
GTGTTCCAGAACCCCTACGGCTCGCTTGATCCGATGTACTCCATCTACCGGTGTATTGAG
GAACCGCTGACCATCCACAAGGTTGGTGGAGACCGCAAGGCACGCGAAGCTCGCGTCGCT
GAACTTGTCGATATGGTGTCCATGCCCAGGTCCACCATGCGCCGCTACCCCAACGAGCTT
TCCGGTGGCCAACGTCAGCGCATCGCCATCGCCCGTGCATTGGCACTGAATCCAGAAGTG
ATCGTGTTGGATGAAGCGGTTTCCGCTTTGGACGTGTTGGTTCAGAACCAGATCCTCACC
CTGCTTGCAGAACTTCAGCAGGAACTGAAGCTCACCTATTTGTTCATCACCCACGACTTG
GCCGTTGTTCGACAAACCGCCGACGATGTTGTGGTGATGCAAAAGGGACGAATCGTTGAA
AAGGGTCGTACCGACGACATCTTCAACGATCCTCAGCAGCACTACACCCGCGATTTGATC
AATGCGGTACCTGGTCTGGGAATCGAGTTGGGTACTGGAGAAAACCTGGTT
>RXN01939-downstream
TAACCCGCACAGCCTCACTAAAC
>RXN01995-upstream
CCGACGCAAAGGCATGCGCCTGCGTGTCTCGAGTAGTCTCCTCCCCTTCCTCGTCCCCAA
CCTCGACCATTACGGTCGCGCTCTCCTAAAGGAGCCTGGC
>RXN01995
ATGGATATCCGCCAAACAATTAAGGACACAGGAATGTCGAGATATCAGTGGTTCATTGTA
TTTATCGCAGTGCTGCTCAACGCACTGGAGGGCTTTGATGTCCTCGCCATGTCTTTTAGT
GCGAATGCAGTGACCGAAGAATTTGGACTGAGTGGCAGCCAGCTTGGTGTGCTGCTGAGT
TCCGCGCTGTTCGGCATGACCGCTGGATCTTTGCTGTTCGGTCCGATCGGTGACCGTTTC
GGCCGTAAGAATGCCCTGATGATCGCGCTGCTGTTCAACGTGGTGGGATTGGTATTGTCC
GCCACCGCGCAGTCCGCAGGCCAGTTGGGCGTGTGGCGTTTGATCACTGGTATCGGCATC
GGCGGAATCCTCGCCTGCATCACAGTGGTGATCAGTGAGTTCTCCAACAACAAAAACCGC
GGCATGGCCATGTCCATCTACGCTGCTGGTTACGGCATCGGCGCGTCCTTGGGCGGTTTC
GGCGCAGCGCAGCTCATCCCAACATTTGGATGGCGCTCCGTGTTCGCAGCCGGTGCGATC
GCAACTGGTATCGCCACCATCGCTACTTTCTTCTTCCTGCCAGAATCCGTTGATTGGCTG
AGCACTCGCCGCCCTGCGGGCGCTCGCGACAAGATGAATTACATTGCGCGCCGCCTGGGC
AAAGTCGGTACCTTTGAGCTTCCAGGCGAACAAAGCTTGTCGACGAAAAAAGCCGGTCTC
CAATCGTATGCAGTGCTCGTTAACAAAGAGAACCGTGGAACCAGCATCAAGCTGTGGGTT
GCGTTCGGCATCGTGATGTTCGGCTTCTACTTCGCCAACACTTGGACCCCGAAGCTGCTC
GTGGAAACCGGAATGTCAGAACAGCAGGGCATCATCGGTGGTTTGATGTTGTCCATGGGT
GGAGCATTCGGCTCCCTGCTCTACGGTTTGGTCACCACCAAGTTCAGCTCCCGAAACACA
CTGATGAGCTTCATGGTGCTGTCCGGGCTGACGCTGATCCTGTTCATTTGCTCCACCTCT
GTTCCATCCATCGCGTTTGCCAGCGGCGTTGTCGTGGGCATGCTGATCAATGGTTGTGTG
GCTGGTGTGTACACCCTGTCCCCACAGCTGTACTCGGCTGAAGTACGCACCACTGGTGTG
GGCGCTGCGATTGGTATGGGTGGTGTGGGTGCGATTTCCGCGCCACTGCTGGTGGGTGGC
CTGCTGGATTCTGGCTGGTCCCCAACGCAGCTGTATGTTGGTGTGGCAGTGATTGTTATT
GCCGGTGCAACCGCATTGATTGGGATGCGCACTCAGGCGGTAGCCGTCGAAAAGCAGCCT
GAAGCCCTAGGGACCAAA
>RXN01995-downstream
TAGGGCCGCGATTCCTAGCATGC
>RXN02062-upstream
TTGTCTAAACATCGTTTTGGGGTGCGAATGATAGCCCCTTTTAATGCCCCCATTTCGGTA
TCGCTGCGCAACTGTTTTTAGATGGCTAATCTTTGAAATT
>RXN02062
ATGAGAGTCGGAATGATGACAAGAGAGTATCCACCAGAGGTTTACGGCGGCGCTGGCGTG
CACGTCACCGAATTGACCCGATTCATGCGTGAGATCGCTGAAGTTGATGTTCACTGCATG
GGTGCAGCTCGCGATATGGAGGGAGTTTTCGTCCACGGCGTCGATGCTGCCTTGGAAAGC
GCGAACCCTGCGATTAAGACACTGTCCACCGGTTTACGCATGGCAGAAGCTGGAAACAAC
GTGGATGTCGTGCACTCACACACTTGGTATGCAGGTCTTGGCGGCCACCTTGCAGCTCGT
CTCCACGGCATTCCTCACGTGGCTACCGCGCACTCTTTGGAGCCAGATCGCCCATGGAAG
CGTGAGCAGCTTGGCGGTGGATACGACGTGTCCTCCTGGTCTGAAAAAAATGCCATGGAA
TACGCTGACGCGGTCATCGCTGTGTCGGCTCGCATGAAAGATTCCATCCTCGCTGCGTAC
GCTCGCATCGAGCCGGACAACGTGCGTGTTGTGCTCAACGGCATCGACACTGAGTTGTGG
CAGCCTCGCCCGACTTTCGATGACGCGGAAGATTCCGTACTCCGCTCCCTAGGCGTTGAC
CCACAGCGGCCCATCGTCGCATTTGTCGGCCGCATCACCCGCCAAAAAGGCGTCGAGCAC
GTCATCAAGGCAGCAGCGCTTTTCGACGAGTCCGTGCAGCTTGTGCTCTGTGCCGGCGCG
CCAGACACCCCCGAAATCGCAGCTCGCACCACCGCCCTGGTGGAAGAACTCCAGGCAAAG
CGCGAAGGCATTTTCTGGGTTCAGGACATGCTGGGCAAGGACAAAATCCAAGAGATTCTC
ACCGCTGCTGACACCTTCGTGTGCCCATCCATTTACGAGCCACTGGGCATCGTGAACTTG
GAAGCAATGGCCTGCAACACCGCAGTTGTCGCATCCGACGTTGGAGGCATCCCTGAGGTT
GTTGTCGACGGCACCACCGGCGCCCTCGTTCACTACGACGAAAATGATGTCGAAACCTTC
GAGCGCGATATCGCCGAAGCGGTGAATAAAATGGTCGCTGATCGAGAGACCGCAGCCAAA
TTTGGTCTCGCAGGGCGCGAACGTGCTATCAATGATTTCTCCTGGGCAACGATTGCTCAG
CAGACCATTGATGTGTACAAATCCTTGATG
>RXN02062-downstream
TAAAACCGAAAGCCGGGGAACCT
>RXN02096-upstream
CGCTTCGACGACCTCACCCACAGCGATATCCGCAGGAATGTCATCGCGGTTTTTGATGAG
CCGTTCTTGTACTCCTCCTCCATACCGGGAGAACATCTCG
>RXN02096
ATGGGTTTGGATGTCAGTGATGAGGAGATCGAACACGCAGCCAGGCTTGCCCAGGCTCAT
GATTTTATCGATCGCCTTCCAAACAAATACGAGGAAGTCATTGGCGAACGCGGCCTGACG
CTTTCTGGTGGTCAACGCCAACGCATCGCCCTCGCACGGGCTTTCCTGGCGCATCCCAAA
GTGTTGGTGCTTGATGATGCCACCTCTGCCATTGATGCCTCCACTGAGGACCGCATTTTC
CAGGCCTTGCGCGAAGAACTGCACGATGTCACCATTTTGATCATCGCGCACCGCCACTCC
ACTTTGGAGCTCGGCGATCGGGTTGGTCTGGTCGAAGATGGACGGGTAACAGCACTGGGA
CCGTTGAGTGAGATGCGTGATCACGCTCGTTTCTCGCATCTGATGGCTCTTGATTTCCAG
GATTCTCACGATCCGGAATTCACCCTCGACAACGGTTCACTACCCAGCCAAGAGCAATTG
TGGCCGGAGGTCTCCACAGAAAAGCAGTACAAGATTCTTGCGCCTGCCCCTGGTCGAGGC
CGTGGCATGTCCATGCCAGCAACCCCTGAGCTGCTCGCCCAGATTGAGGCGCTGCCAGCA
GCAACGGAAGAAACACGAGTTGATGCCGGGAGGCTACGCACCAGTACCTCCGGTTTCAAA
TTGCTCAGTTTATTCAAGCAGGTCCGTTGGCTCGTCGTCGCGGTCATCGCGTTGTTGCTG
GTGGGCGTAGCCGCCGATCTAGCATTTCCAACACTGATGCGCGCAGCCATCGACAACGGT
GTGCAAGCACAAAGCACCTCCACGTTGTGGTGGATCGCCATCGCAGGCAGCGTAGTAGTC
CTTCTGTCCTGGGCCGCCGCCGCGATCAACACGATTATCACGGCACGCACCGGTGAACGG
GTGCTTTACGGCTTGCGTCTGCGCTCATTTGTGCATCTATTGCGCCTGTCCATGAGCTAT
TTCGAACGCACCATGTCCGGCCGCATCATGACGCGCATGACCACCGACATCGACAACCTC
TCGTCCTTCCTCCAATCAGGTCTGGCGCAAACAGTTGTCTCTGTGGGCACGCTCATCGGT
GTGGTCACCATGCTCGGCATCACCGACGCACAACTAGCACTCGTTGCGCTGTCCGTGGTG
CCGATCATCATCGTGCTCACTCTCATTTTGGGACGCATCAGCTCCAGGCTGTACACCGCT
TCACGGGAGCAAGCCAGCCAGGTCAACGCGGTATTCCACGAGTCCATCGCCGGTTTACGC
ACCGCGCAGATGCACCGCATGGAAGACCAAGTCTTTGACAATTATGCGGGCGAAGCAGAG
GAATTCCGACGCCTGCGTGTGAAATCCGAGACGGCCATCGCCATCTACTTCCCCGGCCTT
GGGGCGCTCTCTGAAATCGCCCAGGCACTCGTCCTCGGTTTCGGCGCACTGGAAGTAACG
CGGGGGGACATCTCCACCGGGGTACTCGTGGCATTCGTGCTGTACATGGGCCTGATGTTC
GGCCCGATCCAACAACTAAGGCAAATCTTCGACTGCTACCAACAAGCCGGCGTCGGCTTC
CGTCGCATCACCGAACTGCTGGCAACGGAGCCCAGCGTCCAGATCTGGGCACCAACAGGC
ACGCTAGGCAGGCTGCCACGCAGCCTTTATTGCTTGACGACGTCACCTTCGGCTATTCAG
ACGATCCGATCC
>RXN02096-downstream
TAGACAACGTCACCGTCCAGATC
>RXN02348-upstream
AAAGACCCGAGCCGAAGCCCTGGCCTGCGCATACTTCCTTGTCAACGCTCGCTGGGATTA
GGTCTTTTCTGAGCGCTAGCATTTCTCCACTCAAAGGAGC
>RXN02348
ATGCTTAACCGCATGAAAAGTGCGCGGCCAAAATCAGTCGCTCCAAAATCCGGACAAGCT
TTACTCACTCTCGGTGCCCTAGGTGTTGTGTTCGGCGACATCGGCACCAGCCCCCTGTAC
TCACTTCACACTGCATTCAGCATGCAGCACAACAAAGTCGAAGTCACTCAGGAAAATGTG
TACGGCATCATCTCGATGGTGTTGTGGACCATCACTTTGATCGTCACCGTCAAATACGTC
ATGCTGGTCACCCGAGCTGACAACCAAGGACAAGGTGGCATCCTGGCGCTCGTTGCTTTG
CTGAAAAACCGTGGGCACTGGGGAAAATTCGTGGCAGTAGCCGGCATGTTGGGCGCCGCA
TTGTTTTATGGCGATGTGGTGATCACCCCGGCGATCTCTGTTCTCAGCGCAACAGAAGGC
TTGACGGTTATCTCCCCAAGCTTTGAGCGCTTCATTCTGCCCGTATCTCTGGCAGTTCTG
ATCGCTATTTTTGCAATCCAACCGCTCGGTACAGAAAAAGTCGGCAAAGCCTTCGGCCCC
ATCATGTTGCTGTGGTTTGTCACCCTTGCAGGATTGGGAATTCCGCAAATCATCGGGCAC
CCAGAAATCTTGCAGAGCTTGTCTCCACATTGGGCCCTGCGCTTGATTGTGGCTGAGCCT
TTCCAAGCATTTGTGCTGCTTGGTGCCGTTGTCCTGACAGTAACGGGTGCGGAAGCGCTC
TACGCTGATATGGGCCATTTTGGGGCGAGGCCAATCAGAGTGGCGTGGTTTTGCGTCGTC
ATGCCTGCTTTAATCTTGACGTATTTGGGGCAGGGCGCCTTGGTGATCAACCAGCCTGAA
GCGGTGCGCAACCCCATGTTTTATCTCGCGCCGGAAGGTCTGCGGATTCCGTTGGTTATT
TTGGCGACCATCGCTACGGTGATCGCATCGCAGGCCGTGATTTCTGGTGCGTATTCATTG
AGCAAGCAGGCCGTGAATTTGAAACTGCTGCCACGCATGGTGATCCGGCATACCTCCCGC
AAAGAGGAAGGCCAGATCTATATGCCACTGGTTAATGGATTGCTGTTTGTATGCGTGATG
GTTGTGGTGCTGGTATTCCGATGCTCTGAAAGGCTCGGCAGCGCGTACGGACTTGCAGTG
ACCGGAACCTTGGTGCTGGTCAGCGTCCTGTATCTGATCTATGTTCACACCACATGGTGG
AAAACAGCGCTGTTCATTGTGCTCATCGGTATTCCAGAAGTACTTCTATTCGCCTCGAAC
ACCACGAAAATTCACGACGGTGGCTGGCTTGCACTACTTATTGCGGCCGTGCTGATCGTG
GTGATGCGGACCTGGGAGTGGGGAAGTGACCGCGTCAATCAGGAACGCGCAGAGCTGGAA
CTTCCCATGGATAAGTTCTTGGAGAAACTCGATCAGCCACACAATATTGGTCTGCGTAAA
GTTGCCGAAGTGGCAGTATTTCCACATGGGACGAGCGATACTGTCCCGTTGTCATTGGTT
CGCTGCGTGAAAGACCTCAAGCTTTTATACCGAGAGATCGTGATCGTTCGAATCGTCCAA
GAACACGTTCCGCACGTGCCACCAGAGGAACGCGCGGAAATGGAAGTGCTCCATCACGCC
CCGATCAGAGTCGTGCGAGTTGATCTGCACCTTGGTTATTTTGATGAGCAGAACCTGCCT
GAGCATCTCCATGCCATTGACCCAACATGGGATAACGCCACCTACTTCCTGTCTGCCCTG
ACTCTTCGGAGCAGGTTGCCTGGAAAGATTGCTGGCTGGCGTGATCGTTTGTATCTTTCG
ATGGAACGTAATCAGGCATCTCGAACTGAGTCTTTCAAATTGCAACCAAGCAAAACCATC
ACGGTTGGAACAGAGCTGCACCTT
>RXN02348-downstream
TAATCAGGCAGTTGCTGGCCAAC
>RXN02354-upstream
GAATAAAGAAAAAGAAACTGGGCGGAACCAAGGATGAGAAACCCACCGCTAAGGATGGTG
TTGTAAAGGCCGATTCTGCTGTGAAGGAAGCCGCTAAGCC
>RXN02354
ATGACTAAACGAACAAAAGGACTCATCCTCAACTACGCCGGAGTGGTGTTGATCCTCTTC
TGGGGACTAGCTCCCTTCTACTGGATGGTTATCAGCGCACTGCGCGATTCCAAGCACACC
TTTGACAGCACGCCATGGCCAACGCACGTCACCTTGGATAACTTCCGGGACGCACTGGCC
ACCGACAAAGGCAACAACTTCCTCGCAGGCATTGGCAACTCACTGGTCATCAGCGTCACC
ACAAGAGCGATCGGTGTTCTCGTGGGAGTGTTCACCGCCTACGCTCTAGCCGGACTGGAA
TTCCCGGGCAAAGGCATTGTCACCGGCATGATCTTGGCAGCCTCCATGTTCCCCGGCATC
GCCCTGGTCACTCCGCTGTTCCAGCTCTTCGGTGACCTCAACTGGATCGGCACCTACCAA
GCGCTGATTATCGCGAACATTTCGTTCGGGCTACCTCTGACGATCTACACGCTCGTATGC
TTCTTCAGGCAAGTGCCCTGGGAACTCGAAGAATGAGCACGTGTCGACGGCGCGACACGT
GGCCAAGCCTTCCGCATGATCCTGCTTCCTCTAGCAGCGCCCGCACTATTTACCACCGCG
ATCCTCGGATTCATTGGAACGTGGAACGAATTCATGCTGGCCGGCCAACTATCCAACACC
TCCACAGAGCCAGTGACCGTTGCGATGGCAAGGTTCACCGGACCAAGCTCCTTCGAATAC
CCCTACGCCTCTGTCATGGCAGCGGGAGCTTTGGTGACCATCCCACTGATCATCATGGTT
CTCATCTTGCAACGCCGCATCGTCTCCGGACTCACCGCAGGTGGCGTGAAAGCC
>RXN02354-downstream
TAGACTAGATACTCATGAGTGCT
>RXN02356-upstream
TTGGGAGTAGCCATGCGTTCTGCTCCTGACCTTGAACAGCGGTCCCAATTTAGACCCGCT
AAACCCACAATGTGTACTGGTGCTGGTAATTTAGTAGAAC
>RXN02356
ATGGCAACGGTCACATTCGACAAGGTCACAATCCGGTACCCCGGCGCGGAGCGGGCAACA
GTTCATGAGCTTGATTTAGATATCGCTGATGGCGAGTTTTTGGTGCTCGTCGGCCCTTCG
GGTTGTGGTAAATCCACTACGCTGCGTGCTTTGGCGGGGCTTGAGGGCGTGGAGTCGGGT
GTGATCAAAATTGATGGCAAGGATGTCACTGGTCAGGAGCCGGCGGATCGCGATATCGCG
ATGGTGTTCCAGAATTATGCTCTGTACCCTCACATGACGGTGGCGAAGAATATGGGTTTT
GCGCTGAAGTTGGCTAAGCTGCCGCAGGCGCAGATCGATGCGAAGGTCAATGAGGCTGCG
GAAATTCTTGGGTTGACGGAGTTTTTGGATCGCAAGCCTAAGGATTTATCGGGTGGTCAG
CGTCAGCGTGTGGCGATGGGTCGCGCGTTGGTGCGTGATCCGAAGGTGTTCCTCATGGAT
GACCCGCTGTCCAACCTGGATGCGAAATTGCGCGTGCAAACCCGCGCGGAGGTCGCTGCT
TTGCAGCGTCGCCTGGGCACCACCACGGTGTATGTCACCCACGATCAGGTTGAGGCAATG
ACGATGGGCGATCGGGTTGCGGTGCTCAAGGACGGGTTGCTGCAGCAGGTCGCACCGCCC
AGGGAGCTTTACGACGCCCCGGTCAACGAATTCGTTGCGGGCTTCATCGGCTCGCCGTCC
ATGAACCTCTTCCCTGCCAACGGGCACAAGATGGGTGTGCGCCCGGAGAAGATGCTGGTC
AATGAGACCCCTGAGGGTTTCACAAGGATTGATGCTGTGGTGGATATCGTCGAGGAGCTT
GGCTCCGAATCGTATGTTTATGCCACTTGGGAGGGCCACCGCCTGGTGGCCCGTTGGGTG
GAAGGCCCCGTGCCAGCCCCTGGCACGCCTGTGACTTTTTCCTATGATGCGGCGCAGGCG
GATCATTTCGATCTGGAGTCGGGCGAGCGTATCGCT
>RXN02356-downstream
TAGTTTCGGACGTGGGGAGGCGT
>RXN02391-upstream
CAAAGTGGCGATCCTGAATTTGCCATCGAATCTGCCGTGAGAAGAGTTGCAGAGCTGGCG
AGGCGGTAACGCTGAACGGCGGCGGGTAAGATATTTGAGC
>RXN02391
ATGACACAATCAGATTTACCCGATGATGTTCAGGAATTGGTCACTAAGATCTTTGGACTG
GCACGTGATGGGGGAGCAGAATCCGCAGCAACCCTCGGTGCATATGTCGACAACGGCGTT
GACGTTAACCTGTCCAACCAAGATGGCAACACTTTGCTCATGCTCGCAGCATATGCAGGA
CATGCTGATGTCGTGCAGGCGTTGATTGAGCGTGGCGCCGATGTGGATCGCGTGAACAAC
CGCAATCAGACGCCGCTGGCGGGCGCGATCTTTAAGAAGGAAGAAGCCGTCATTGAGGCA
CTGCTTGCTGGTGGTGCTGACCCATACGCTGGAACTCCAACTGCTGTTGATACCGCCAAG
ATGTTTGGCCGCGAGGATCTCGTAGCTCGCTTCGAGTCA
>RXN02391-downstream
TAGGCCGGTGGAGTGGACCGCTT
>RXN02442-upstream
GCCGTGATGTTGTTGAGCGCGATGTGATTGCCGTATGTGCATGTGAGATTCCGGACGCTG
AGTTCTGCCATTCCTTAATGATAACGGTTATCATTTTCAA
>RXN02442
ATGAAGTTTTTTACTGACGCCCTCATAGTGCCTTTTGACGTTTCATTCATCTCCCGCGCC
CTGGTCGCCGGATGCCTGGCCGCAATTTTATGCTCACTCATTGGAACGTGGGTTATTTTG
GGCAGGCTAACCTTTTTCGGCGACGCTATGTCGCACGGCTTGGTCGCCGGAGTAGCCACG
GCATCACTATTGGGCGGAAATCTCATGTTGGGCGCAGGAATGAGCGCATTAATCATGTCA
GCCGGAGTGGTGTGGACCAGCAGAAAATCCAGCCTGTCCGAAGACGTCAGCATTGGGCTG
CAATTTATTACCATGCTTTCCCTCGGCGTGGTTATTGTGTCCCACTCCGATTCCCACGCC
GTAGACCTCACCAGTTTCCTTTTTGGAGACATTCTTGGCGTGCGACCCTCGGATATATTC
ATCATCGCCATTGCAACAGTGTTGGGTGGATTGAGTATTTTTCTCTTCCACCGACAGTTC
ACTGCACTCGCTTTCGACGAGCGTAAAGCTCACACCTTAGGACTCAATCCCCGCTTTGCA
CACCTACTCATGCTGGCACTGATCGCATTAGCTACGGTGGTGTCGTTTCAGGTGGTGGGA
ACGCTTTTAGTGTTTGGACTTCTGATTGGTCCGCCCGCCACGGCTGCACTTTTAGTGCAA
GACAAAGCAAGTATTTCACTGATCATGATGGTCGGGTCGCTTCTTGGATGCGCGGAAATT
TACCTCGGGCTTTTAATCAGCTGGCACGCAAGCACTGCCGCGGGAGCCACTATCACTTTG
TTAAGTGCTGCGATATTTTTTGCCACCTTATTGACAAAGAGTGCGATTAGTAGGTTAAAC
TTCACCGCG
>RXN02442-downstream
TGATACTGAAAGACATTTTCAAT
>RXN02447
ACAGTAGTTCCGGTGTACCTCGCTGAACTGGCACCACTAGAAATCCGCGGCTCCCTGACC
GGCCGAAACGAGCTTGCTATCGTCACCGGCCAGCTGCTTGCCTTCGTGATCAACGCGCTT
ATCGCCGTCACCCTACACGGAGTTATTGATGGAATCTGGCGCATCATGTTCGCCGTCTGT
GCCCTCCCTGCCGTCGCCCTCTTCCTCGGCATGCTGCGGATGCCGGAATCACCACGCTGG
CTGGTCAACCAGGGGCGTTACGACGACGCCCGCCGCGTCATGGAGACCGTCCGTACCCCT
GAGCGTGCGAAAGCCGAAATGGATGAAATCATCGCGGTGCACTCTGAAAACAATGCGGCA
CTTCCTGGTGTTAAGCAGTCTTCGGGCCAGGCTTCAGGCCAGGTTTCTAGCAAGCACACC
CACATGTCCATCGGCGAAGTCCTCAGCAACAAATGGCTGGTTCGTCTGCTCATCGCCGGC
ATCGGTGTTGCAGTTGCCCAGCAGCTCACCGGCATCAACGCCATCATGTACTACGGAACC
CGCGTCCTCGAGGAATCCGGCATGAGCGCAGAAATGGCTGTGGTTGCCAACATTGCTTTC
GGTGCCGTTGCCGTCATCGGTGGACTGATCGCACTGCGCAACATGGAGCGCCTGGATGGC
GGCACCACCTTCATCATCGGCCTGTCACTGACCACCACCTTCCACCTTTTGATCGCAGCT
GCCGGCACTCTCCTTCCAGAAGGTAACTCCATTCGACCATTCGCCATCATGATCCTTGTT
GTTGGGTTCGTGCTCTCCATGCAGACTTTCCTCAACGTTGCAGTGTGGGTGTGGCTGGCG
GAAATCTTCCGAGTCCGAATGAAGGGTATCGGCACCGGTATTTCGGTATTCTGCGGTTGG
GGCATCAATGGCGTCCTAGCGTTGTTCTTCCCAGCACTGGTCTCCGGCGTGGGTATCACC
TTCTCCTTCGTTATGTTCGCAGTGGTCGGAGTCATTGCCCTGGCGTTCGTCAGCAAGTTT
GTTCCTGAAACCCGTGGCCGCTCACTTGAAGAACTCGATCACGCAGCATTCAGCGGCCAG
ATCTTCAAGAAGGCT
>RXN02447-downstream
TAAACCCCCTCCGATCTCTTTGG
>RXN02455-upstream
AAGCCTTCGTTATGGGAGGTCTCCCAGACACAATCGAATACGGGCCGGATATCCATCTCG
GCTCATCACCCCGCTTTTTATCAAGAAAGATGAGGACCTC
>RXN02455
TTGAAGCGTCTTACTCGCATCGCATCCATCAGCATGGCCTCCATGCTCGCCGCCGCAAGT
CTCGTCGCGTGCTCCGGCTCCACCGACGAGGAAGGCGATGTTTACTTCCTGAACTTCAAG
CCTGAACAGGACGTGGCATACCAGGAAATCGCAAAGGCCTACACTGAAGAGACCGGCGTT
AAGGTCAAGGTCGTTACTGCCGCCTCCGGCTCCTATGAGCAGACCCTCAAGGCCGAGATT
GGCAAGGACGAAGCCCCGACTCTCTTCCAGGTCAATGGCCGAGCCGGCTTCATCACTTGG
GAGGACTACATGGCAGATATGTCGGACACCGAGGTAGCTAAGCAGCTGACCGACGACATT
CCGCCGGTGACCACCGAGGATGGCGAGGTACGTGGCGTTCCGTTCGCCGTCGAGGGCTTC
GGCATCATGTACAAGGACGAGATCTTCGACAAGTAGATCGCCACGTCCGGCGGAAAGATC
AAGTCCACGGATGAGATGACGAGCTACCAGAAGCTCAAGGAAGTCGCCGAGGATATGCAG
GCAAAGAAGGACGAGCTGGGTATCGAAGGCGCCTTCGCCTCCACCTCGCTGACATCGAGT
GAGGACTGGCGTTGGCAGACCCACCTGGCCAACGCTCCGATCTGGCAGGAGTACCAGGAC
AAGGGAGTCGAGGACACCAACGAGATCGAGTTCTCCTACAAGAAGGAGTACAAGAACCTT
TTCGATCTCTACCTTGAGAACTCCACCGTAGAAAAGTCTCTTGCGCCGTCTAAGACGGTG
TGTGATTCCATGGCTGAGTTCGCACAGGGCAAGGCCGCTATGGTTGAGAACGGTAACTGG
GGATGGTCCCAGATTTCCGAGACTTCTGGCAACGTGGTGAAGGAAGACAAGATCAAGTTC
CTGCCCATGTACATGGGTCTGCCAGATGAAGAAAAGCACGGCATCAACGTCGGTACCGAG
AACTATTTGGGCGTGAAGTCTGAGGCCTCCGAGGTCGACCAGCAGGGCACCAAGGACTTC
GTGGATTGGCTGTTTACCTCTGAAGCTGGCAAGGAGGACGTGGTGAAGGACCTTGGCTTC
ATCGCACCGTTCGAAAGCTACACCGCTGAGAACACCCCGAATGACGCCCTTTCTGAGCAA
GTCGCGGAAGCTATCGCTAACAAGGATCTGACCACCTACCGGTGGAACTTCCAGTACTTC
CCGTCCCAGCAGTTCAAGGATGACTTCGGCCAGGATCTGTCGCAGTACGCCTCCGGAAAG
CTGAAGTGG
>RXN02515-upstream
GTGGCTAAGCACAGTTACTTGGCCAAGCTGGGCGGCAGAAAAACCGGCCCAGCTAATACT
TCAGTTTAAAATTCGCTTCAACCCTGAAAGATTGTGACAG
>RXN02515
ATGAGCACTCTTGAAATCCGTAACCTGCACGCACAGGTCCTGCCGTCCGATGAGTCCGCT
GAGCCTAAGGAAATCCTCAAGGGCGTCAACCTCACCATGAACTCTGGTGAGATCCAGGCC
ATCATGGGCCCTAACGGTTCCGGCAAGTCCACTCTTGCTTACACCCTTGGTGGACAGCCA
CGCTACGAGGTAACCGCAGGCGAGGTCCTCCTCGACGGCGAGAACATCCTGGAGATGGAA
GTTGATGAGCGTGCACGCGCTGGTCTCTTCCTGGCCATGCAGTATGCAACTGAAATGCCT
GGCGTTTCCGTTGCTAACTTCCTGCGTTCCGCAGCGACCGCAATCCGCGGCGAGGCTCCT
AAGCTTCGCGAGTGGGTTAAGGAAGTGCGCACCGCTCAGGAAGCTCTGGCAATTGACCCT
GAGTTCTCCAACCGCTCAGTCAACGAAGGTTTCTCCGGTGGCGAGAAGAAGCGCCACGAG
GTTCTGCAGCTTGATCTGCTGAAGCCAAAGTTCGCGATCATGGATGAGACCGACTCCGGC
CTTGACGTGGATGCACTGCGCATTGTTTCCGAGGGCATCAACTCCTACAAGCAGGAGACC
GAAGGTGGCATCTTGATGATCACCCACTACAAGCGCATCCTCAACTACGTTAAGCCTGAC
TTCATTCACGTTTTCGCGAATGGCCAGATTGTGACCACCGGTGGCGCTGAGCTTGCTGAC
AAGCTCGAGGCTGACGGCTACGACCAGTTCATCAAG
>RXN02515-downstream
TAACATGTCCGATTTCCTCAATG
>RXN02549-upstream
GCAGTCGCAGTAGTTGGGGTTTCAATGATCTCAGGGCAGGACACTGTTCCCACTGGTAAC
GCCGTAACTGCAGACGATGCCCTGCTCGGTGGCCCTGAGT
>RXN02549
ATGGTTCACGCGAAGCAGACTAAGAAGCCACTTCCCCGTTTTCTTCACTCGGCGCATTTC
TATGTGTGGATTGTGCTGGGTTTTGTGGTGTTTGCGCAACCTTATGGTCAGGTTGCTGCC
GATACTAAACTAGATTTGCTGCTCAACCGCGGAGGATTTTTAACCGGTGCGCTTCATGCG
TGGACTGACACGTTCAGCTTGGGTCAGTTGGAAAACCAAGCTTATGGCTATCTGTTTCCC
GAAGGGTTTTTCTTCCTCATAACTGATTTCCTCCCTGACTGGATTGCGCAGCGACTGTGG
TGGTGGCTTGTTCTTGGCCTGGGATTTTCTGGATTCTACGCACTGGTAGCCCGGCTGGGG
ATTGGCAATCCTGCATTCAGGGTGATCGCCGCGCTGCTGTTTGCTCTGTCCCCGCGCACG
CTCACCACCCTCACTGCAATCTCCTCCGAAACTTGGCCTATCATGCTCGCGCCATGGGTA
TGTCTGCCTCTGCTTTCGCGAAATGTGGATGCACGGGCCATCGCGTTGTCCTTACTTCCC
GCGGCATGCATGGGTGCAGTTAATGCCACCGCCAGGATGGCAGCACTCATCCCGGCAGCG
CTGATCTTGCTGTATAGAGGGCTCTTCTTAAGGCTGCTTCTGTGGGGAATGGGCGTTCTC
GCTGTTAATTCATGGTGGATCGGACCTTTGTTGGTGCTTGGCAAATACGCCCCGCCCTTC
ACCGAATTCATCGAAAGTTCCTCCGTCACCACTTCCTGGCTCAACCCAGTAGAAATACTC
CGCGGAACCACCAGTTGGACACGCTTCGTAGACACTGAACGACAAGCCGGATATCTCCTG
GTCAACGATGCTCTCTTTGTCACCCTCAGCGTTCTCGTCGCAGCCCTCGGCTTGATCGGC
CTCACCTTGATGAAACACCGTGGACTGTGGGCATTCATGCTGGCCATCGGACTCCTCATC
CTCGGCAGCGCCCACCTAACGGCTGTTCAAGAATTCCTCGACGGCCCAGGCGCAGCACTT
CGAAACATGCACAAATTTGATCTATTAGTCCGCATGCGGTTGATGGTGGGCGTTGCCGCA
TTGGGGTGGCATATCAGTCTGCCCTTGCTTGGGACGACTGCATTGACCAGCGGACAAGGC
AAACACCACACCATCCCGCTGCCTCTCCAAAAAGGCCAAGCCGCAGGACTCCTCGTGGTG
ATCATCGCTGTCGGTGCTCTTGCTCCGGCATGGTCGGCACGGCTGCTACCTCAGGGAACG
TGGGATGAAGTGCCTGACTACTGGTACGAAGGCACAGAATTCGTCAACCAAAACGCGACA
GGCACCCGGACGTTGATTTGGCCTAGGTGGGCGTTTGCCCGCCAGGACTGGGGATGGAGT
CGGGATGAAGCAGCTCAACCACTTCTTGATGTTCCGTGGGCTGTGCGCGATGCCATTCCT
TTGGTTCGGCCGGAGGCGATTCGCGGATTAGATGGTCTCGACGACCTAGGCACTGTAGGC
AGCGGTCTAAACGACGAGGCTTTAAAACGTCTAGGCATCGGCGCAGTACTGGTGAGGCAT
GATCTGGAAGCCGAGCCAGATATTGAGGTGGATCTGCCTGGGGAAAAGCACACTTTTGGC
TGCCAAGGCCAAGTAGACGTCTACCTCACCGACCCCGACCGCAATATGTGGATCACTTGC
GGCAGATCCAAGCAGCTGCCCACCGTCGCTGGCGGCGGCGAAATGCTCTCGCTGCTAGAC
ACCATCAACGGCTATTCCCCGAGGACTTTGGTGAGTGAGAATGCGCAGATCGTCACCGAT
ACCCCTCAGCTAGTCGGCACAAATTAGGGCGATGGCACCAGTTCCGCAGCATTGGCCAGC
CTTGATGAGACTGAGGTGAAAAACCGGATCGTGGATTATCCTTCCGCGGGGCCAATGACG
CAGGTGGTGCAGGAAGGTTCCATCACGGCGTCTTGGTCTGGTTCCGATGCGACTTCTTTC
GGGGGCGCGGATCCTGATCGTTCCCTTAATTCACTTCTTGATCATCGTTACAACACGGCC
TGGTACCCGACACGTGGCGATACGTCTCCGTGGCTCGAAGTCTCCGGTACCGGCACCACA
TTATGGATCTCCCCCCGCAGCACCGTCACCGCCACCATCACCTCCGGCGATTCCGTGATG
GTCCGCGAGTTGGAAAAAGGCCGCACCAGCACAGTTACGTTGGCGGAGCCTGAAGCTCGC
ATTGAATTCGATGGTTTCGTAGGAATTTCCGAGCTGTCCCTAGAGGGTCTCAGCCGCACC
ATCACTGTGCCGGAGACCTCTCCTGAGGTGCAGCAATTCGTTTTCCAACGCCTCACAGTG
CCCACCTCGTTCCTCGACCGCACTTTCACAGTCCCCCGCCACATGTCCGTCACCGTGGAG
GCCCAATCCTGCGTCACATTGGAACTCGACGGCGATCGCATCGACTGTGGCCCCTCGAAC
TCACCCCCGGAACCCACACCCTGCGCACCCAATCGGAATGGGTCACCCTCACCGAATCCG
CTCCGCTCGCCGCTGTTCAGCCAGCAACAAACATCGAGGCAGCACCCACCGACCGCGTGC
TCGTCACCACGCGCGCTTTCAATTCAGGTACCAGCGCGCTTATCGACGCCACCCCCCTTT
CGCCAATCCAACTCGACGCCTCCTCCCAAGGTTTCATCATCCCCGCGAACGCCTCCGGCG
AGT
>RXN02549-downstream
TGAGCTTCGCTTTCGACGGCGAA
>RXN02570-upstream
CCATTGTTATGCTCATTGTGTTTGTGGTGGTCAAGTCGCTACCCAAGCGCACCACTAGGG
CATTGGTTCCGCAGCGGGTTCCGGAGGACGTCGCTTAAAC
>RXN02570
ATGAATCCTTTGACATGGATCATTGGCGCATTCAGCATGTGGATCGTGGTGCTGGGCGTT
AATAAGCTTGGTTTAAGCATCGCAGTGATCATCATCGCGCAGGTCGTGGCCATGATTCGG
GTGCGCAATGTATCTGTGTTGGCTTCAACAGCATTGTTATCGGTTCCTGCATTGGCCTCG
ATGGCGCTGATTCACATGCCGTATTCTTCCGACGGCTGGTTGATTGCTCTTACCTTGACG
GCTCGTTTTAGTGCGTTGATGTCTATTTTCCTCCTTGCAGCAACAGCGATTACTATTCCT
GAGCTGGTGAAATCCCTATATCGTTGGCCCAAGCTGGCGTATATCGTGGGTTCTGCATTG
CAGATGATTCCGCAGGGTAAACAGACCTTGGCGTTGGTTCGTGATGCCAATGCTTTGCGC
GGGCGCAGCGTTAAACGTCCCGTGCGCGCGGTGAAATATGTGGGTTTGCCCCTGATTACA
CATTTACTTAGTGCAGGTGCCGCGCGAGCGATTCCCTTGGAGGTCGCAGGCCTGGACAGG
CCGGGGCCGCGTACGGTGTTGGTTGAGGTGGTGGAGGGGCGCGTCGAAAAGCATTGTCGC
TGGTTGTTGCCGCTTTTGGCAGTCGGGATGGCGTGGTGGCTC
>RXN02570-downstream
TAACTCAAATCGTCGGACCGTCC
>RXN02595-upstream
GTGGGTAAAGGGGACTCCGAGGAAGTCCACGTCGTCTTCTTTCGCGGCGCTGAGGATGGT
TTCGCGGATTTGTGCGGGGGAGTGGGTGGCAGAGAAAACG
>RXN02595
GTGATCGTTGTGGCCATGGCTTCCATTATGGCTTGTTTAAAAGCAGCTAGACTGAATAAC
CCTATGAAGATCCTTTTGTTGTGCTCGCGTGATACCACTCATCCTCAAGGTGGCGGAAGT
GAACGCTATCTCGAGCGGGTGGGTGAGTTTTTGGCGGATCAGGGCCATGAGGTGGTGTTT
CGTACTGCTGGGCACACGGATGCGCCACGGCGTTCTTTCCGCGATGGTGTGAGGTATTCC
AGGAGCGGTGGGAAGTTTAGTGTGTATCCCAAGGCGTGGGTGGCCATGATGTTGGGTCGT
GTGGGGATTGGCACGTTTTCCAAGGTTGATGTGGTGGTGGATACGCAGAATGGCATTCCG
TTTTTTGGAAAGTTTTTCTCCGGTAAGCCGACTGTGTTGCTCACGCATCATTGCCATAAG
GAGCAGTGGCCGGTGGTGGGTCGGGTGCTGGCGAAGGTTGGTTGGCTGATTGAGAGCCAG
ATCGCGCCGCGCGCTTACAAAACTGCGCCGTATGTGACTGTTTCAGAGCCGAGCGCTGAG
GAGCTCATTGCGTTGGGTGTGGATCAGCAGCGGATTCATATCGTGCGCAATGGCGTGGAT
CCCGTGCCGCTGCACACGCCGAAGCTGGATCGCGATGGCCAGCATGCGGTGACGTTGTCG
CGCCTGGTTCCGCACAAGCAGATTGAGCATGCGATGGATGTCGTCGCGGCGCTCGACGGC
GTGGTGCTGGATGTAGTCGAAAGCGGTTGGTGGCAGAAGGAACTGGTCGATTATGCCCGC
ACGCTGGGTGTGAGCGATCGCGTGGTTTTCCACCGCCAGGTCGCCGAGGATCACAAGCAC
GCCCTGTTGGAGCGCGCCACGATTCATCTCATGCCTTCGCGCAAGGAAGGCTGGGGCCTG
GCGGTCACGGAGGCGGCGCAGCACGGCGTTCCGACGATCGGTTACCGAAGCTCAGGCGGC
CTGCGCCATTCCGTCGTCGACGGCGAAACCGGCCTGCTTGTCGACTCCAAGGCCGAGCTT
ATTTCAGCCACCAAAACCCTGCTTATCGACGCCTCCCTCCGCTCCAAGCTCGGCGCCAGC
GCGAAGCAGCGCGCCGAAAACTACAAGTGGGACACCGCGGGAGCGCAGTTCGAGGAACTA
CTTCTTGGTCTTGCGTCGAAAAAG
>RXN02595-downstream
TAGTCCCAGCGGCAACGCCATCC
>RXN02614-upstream
TCATTGTATACGCCACCCTCGGTCTGCTGTCTGAAGCGCTGATCAGAGCTTGGGAACGTC
ACACCTTCCGCTACCGAAACGCATAAGAAAGTTGCTCGCC
>RXN02614
ATGACTGCCACATTGTCACTCAAACCCGCAGCCACTGTCCGTGGATTGCGCAAATCATAC
GGAACTAAAGAAGTCCTCCAAGGAATCGACCTCACCATCAACTGCGGCGAAGTAACCGCG
CTGATCGGACGGTCAGGTTCAGGAAAATCCACCATCCTGCGCGTGTTGGCGGGCCTATCT
AAAGAGCATTCCGGCTCTGTAGAAATTTCCGGAAACCCGGCCGTTGCCTTCCAAGAGCCT
CGCCTGTTGCCGTGGAAAACGGTGCTCGATAATGTGACCTTTGGCCTCAACCGCACTGAT
ATTTCGTGGTCAGAAGCACAAGAACGCGCCTCGGCACTGCTTGCAGAAGTCAAACTTCCC
GACTCCGACGCCGCCTGGCCCCTCACGCTCTCCGGCGGCCAAGCCCAGCGCGTCTCCCTT
GCGCGAGGGCTCATCTCCGAGCCAGAGCTTTTGCTTCTCGACGAACCCTTCGGCGCCCTC
GATGCTCTGACAAGACTGACAGCCCAAGACCTGCTGCTCAAAACCGTGAACACCCGAAAC
TTGGGAGTTCTGCTGGTCACCCATGATGTTTCCGAGGCCATCGCCCTGGCCGACCACGTC
CTTCTTCTTGACGACGGCGCCATCACACACAGTTTGACTGTAGATATCCCCGGCGATCGC
CGCACCCACCCCTCCTTTGCCTCCTACACCGCTCAACTCCTTGAGTGGCTCGAAATCACC
ACACCTGCG
>RXN02614-downstream
TAGAAAGAAATCATGAAATTTAA
>RXN02795-upstream
GCGGTGTGGCCCGGTGCTGCGATCGCTTTGACGGTCCTTGGTTTTAATCTTTTCGGTGAT
GGTTTACGCGATGCCATCGATCCAAAGCGGGAGGTCGGCC
>RXN02795
GTGCTTAAAGTTTCTGATTTAACGGTTGGCAACAATTTTGTCCACAACGTCTCCTTGGAG
GTCAACCCGGGCGAACGCGTCGGCATCATCGGCGAGTCCGGCTCAGGCAAATCACTCACC
GCGCTATCCATCATGGGTTTAACTGACCTGCCGACCACCGGCCAGATCACCTTCAACGGC
AAACCCTCCGCTACATTCCGTGGCACCCGCATCGCCATGGTTTTCCAAGAACCAATGAGC
GCACTCAACCCGCTCATGCGCATCGGCCGCCAAATCGAAGAAATGATGACCCTGCACGGG
GCAAGCAAAAAAGACGCGCGGGCGCGCTTAAAAAGCTTGCTTATCGACGTCTCCCTCCCC
GAACGCACCGCTTCGGCCTACCCACACGAACTTTCAGGCGGGCAACGCCAACGCGCACTA
ATCGCAATGGCGCTGGCCAATGATCCTGACCTGTTGATCTGCGATGAACCCACCACGGCT
TTGGATGTGGTTGTGCAAAAACAAATCGTCGATCTGCTGCTGCGTCTCACCAAAGAACGT
GGCACCGCTTTATTGTTCATCACCCACGATCTTGGACTCATCGCGCGCACCTGCGAACGC
TTATTGGTGATGAAATCCGGCGAAACCGTAGAACGCGGCGACACCGAGGCAATTCTTCGC
TCCCCCGCCCATTCGTATACCCAACAGCTCCTTGATGCTTCAATCCTTGACCAGCCAGAA
ATCGCCTCAGATTCTGGCGCGCCGGTAGTGATTGATGTGGAGGAGGCGTCGAAAAGCTTT
AAAGAAACCACCGCCCTCCACAAGGTTTCATTGGCGGTGCGCAAAGGTGACCTGCTTGGA
ATAGTCGGCGGATCAGGTTCCGGCAAAACGACTCTGCTGAAGCTGATCGCCGGTTTGGAT
AAGCCCACAAGCGGTACCGTTGCGGTAACCGGTGGTGTGCAGATGGTGTTTCAGGATCCC
CAATCAAGCCTCAACCCACGGATGAAAATCAAAGACATTGTCGCCGAACCACTGCTTGGT
TGGAAGGCGGCGGAGAAAACCACACGGGTTGCGGAAGTCATCACCCAAGTGGGACTGAGC
CCCGATGTCTTAGATCGCTACCCCCACGAATTCTCCGGAGGACAGCGCCAACGAATCTCC
ATCGCCAGAGCCCTCGCCATCAAACCAGCGATCCTGCTTGCCGACGAACCTGTCTCCGCC
CTCGATGTGTCCGTACGTAAACAAGTACTGGATGTTCTCCAACAACTCGTCGAAGAATAC
GGCATCACCTTGGTGTTCGTCTCCCACGATCTGGCAGTGGTGAGACACCTGTGCACAACC
GTGTGGGTGATGGAACAGGGACGAGTCCTTGAGCAAGGGCCCATCGATTCGGTTTATGAT
CACCCACAGACCGAATACACCAAGGAGGTGGTTGATGCCGTTCCGCGGTTGAGGCTT
>RXN02795-downstream
TAAACCAGCGCAGATGACAACGC
>RXN02925-upstream
AAACCGTCCACCGGGCAATTGAGGAGACCGGCTACACCGTCTTGTCCTGATCGATTCACC
CATCATCTCGACCCCGACCGGGTTGAGCGGAAGGAACCTC
>RXN02925
ATGAGCACTCCCCAGCACCACGGTGATCACCCCGCTCCGGAAACAGACCACACCCACCAC
CCGAATCATGCCGGTCAGGAGCACCATGCGGATGCCGCCACCCACGGCCAGGCCATGCCG
CACGATCATCCGCATTCCACTGTCGATGAAGAACATCAGGTCCACAGTCACGGTGAACAC
GCCGGCCACAGCGCCGCGATGTTCCGGGACCGCTTCTGGTGGTCGCTGATCCTGTCGGTT
CCGGTGGTGTTCTTCAGCCCGATGTTCGCCGACCTGCTGGGATATAATATTCCGGAGATT
CCGGGAGCCTACTGGATTCCTCCGGTCCTGGGCACGATCATCTTCCTCTACGGCGGCACC
CCCTTCGTCAAGGGCGCAATGACCGAGCTGAAATCCCGCCAACCGGGCATGATGCTGCTG
ATCGCCATGGCGATCACCGTGGCGTTTATCGCCTCCTGGGTCACCACCCTGGGGCTGGGC
GGGTTCCACCTAGATTTCTGGTGGGAACTGGCCCTGCTGGTGACCATCATGCTGTTGGGC
CACTGGCTGGAGATGCGCGCTCTTGGTGCAGCCTCCTCCGCGCTTGACGCGCTGGCAGCG
CTCCTGCCCGATGAGGCCGAGAAGGTCGTCGACGGGACCACCCGCACCGTAGCGATCTCA
GAGCTGGCCGTCGACGATGTCGTGCTGGTCCGAGCAGGTGCCCGGGTCCCGGCCGACGGG
ACCATCATCGACGGAGCGGCCGAATTCGATGAGGCCATGATCACCGGCGAATCCCGACCC
GTCTACCGGGATACCGGTGAGACCGTGGTGGCCGGCACCGTGGCCACCGACAACACCGTC
CGTATCCGGGTGGAGGCCACCGGTGGGGACACCGCCCTGGCAGGCATCCAGCGCATGGTC
GCCGACGCCCAGGCCTCCTCCTCCCGGGCCCAGGCCCTGGCCGATCGAGCCGCAGCCTTA
CTGTTCTGGTTCGCCCTGATCACGGCCCTGATCACCGCCGTGGTCTGGACCATCATCGGC
AGCCCCGACGATGCCGTGGTCCGCGCGGTGACCGTGCTGATCATGGCCTGCCCGCACGCC
CTGGGCCTGGCCATCCCGCTGGTCATCGCGATCTCCTCCGAGCGCGCGGCGAAATCCGGG
GTGCTCATCAAGGACCGCATGGCACTCGAGCACATGCGCACCATGGACGTCGTCTTGTTG
GATAAGACCGGCACCCTGACCGAAGGCGCACACGCCGTCACCGGCGTGGCTCCGGCCACG
GGTATGGCCGAGGGTGAGCTGCTGGCCCTGGCCGCCGCCGCTGAGGCCGATAGTGAGCAC
CCCGTGGGCCGCGCGATCGTGACTGCCGCGGCCGCACACCCGGAGGCCTCGCAGCGTCAG
CTGCGCGCAACCGGTTTCACCGCCGCGTCCGGCCGCGGGATGCGGGCCACCGTCGAGGGT
GCCGAAATCCTCGTGGGCGGGCCGAACATGCTACGCGAGTTCAATCTGACCACCCCGGGT
GAGCTCGCCGACATCACCGGTTCCTGGGCACAGCGAGGTGCCGGAGTGCTACATGTCGTC
CGCGACGGTGAGATCATGGGTGCGGTGGCAGTGGAGGACAAAATCCGCGGCGAATCCCGC
GCGGCGGTACGGGCCCTGCAGGCCCGCGGGGTGAAGGTGGCGATGATCACCGGTGACGCC
ACCCAGGTCGCCCAGGCAGTGGGCAAGGATCTGGGGATCGATGAGGTCTTCGCGGAGGTT
CTGCCGCAGGACAAGGACACCAAGGTCACCCAGCTGCAGGAGCGCGGTCTGAGCGTGGCC
ATGGTCGGCGACGGTGTCAATGACGCCCCGGCCCTGGCCCGGGCCGAGGTCGGTATTGCG
ATTGGCGCGGGTACAGATGTGGCGATGGAGTCCGCCGGGGTGGTCCTGGCCAGTGATGAT
CCCCGGGCCGTGCTGTCGATGATCGAGCTCTCCCATGCCAGCTACCGCAAGATGGTCCAG
AACCTGGTCTGGGCGACCGGGTACAACATCGTGGCCGTTCCGCTGGCCGCCGGTGTGCTC
GCCCCTATCGGTGTGCTGCTTCCCCCGGCGGCGGCCGCCATCTTGATGTCCCTGTCCACG
ATCATCGTCGCCCTCAACGCCCAGCTGCTACGCCGGATCGACCTGGACCCGGCTCACCTA
GCTCCGACCGACGGGAAGGAGGAGAAGGCTGCTGTGAGCTCTGCAGCCCCCGTCCGC
>RXN02925-downstream
TGACTTTCAATGCTTCATGGACT
>RXN02933-upstream
TGATCTGCTGTATGAGGTGGTTGATGCAAGAGTCGGTGCTGTTGGGGTTGCTAGCACTAA
GGTTCCAGGGAGCGTGGCTTAAGTGACAACGATCAAAAAC
>RXN02933
ATGCCCCTTTCAGGGAAAATCGGCGGCTTCATCGTTGCCGTTGTATTTGTTCTTGCTGCG
GTGTCTTTCATTTGGACTCCGTTTGATCCAGTTCAAGCTTTCCCACAGGAGCGCCTTGAG
GGAAGTTCTTTGAGGCACCTGTTGGGAACGGATGGTTATGGTCGCGATGTTTTATCCCAG
ATCATGGTTGGTTCCCGCGTCACGTTGTTGGTGGGCATCATTGCGGTGGCGATGGCAGCA
TTAATCGGCACGCCACTGGGTATTGCTGCGGGAATGCGCCGTGGCATGGTGGAAACCTTT
GTCATGCGTGGTGGCGATTTAATGTTGGCGTTCCCAGCACTGTTGTTGGCGATTATTTCC
GGCGCCGTTTTCGGGGCCTCCAGGTGGTCCGCGATGGTCGCGATCGGCATCGCAGGCATC
CCTAGTTTTGCGCGCGTGGCTCGTGCAGGCACATTGCAGGTGACCAGTCAGGATTTCATC
GCAGCTGCTCGGCTATGAAAAGTAAGTTCGGCCCGGATCGCGCTTCGCCATATTTTGCCC
AACATCACCAGCATGTTGATCGTTCAGGCATCAGTAGCTTTTGCCCTGGCGATCCTGGCG
GAAGCCGCATTGAGTTTCCTGGGTTTGGGCACCACTCCCCCGGATCCCAGCTGGGGTCGC
ATGTTGCAAACCGCTCAAGCATCCATCGGCGTCACCCCCATGTTGGCGGTGTGGCCCGGT
GCTGCGATCGCTTTGACGGTCCTTGGTTTTAATCTTTTCGGTGATGGTTTACGCGATGCC
ATCGATCCAAAGCGGGAGGTCGGCCGTGCT
>RXN02933-downstream
TAAAGTTTCTGATTTAACGGTTG
>RXN02945-upstream
TTCCGGTGCGATCCTTGCCGGCCTGCTCAGCTGGTACCTGGTCCGCGCGTTGGCGAGGAC
TGGTGGACTTGATCGTTTCGCCGCTGGCGGCGAGGTATAA
>RXN02945
ATGACCACCGCACTTGGAACGCGCGTTGTTGCGCGCAACTTTGGCTACCGCCATGCTTCC
CGGGAAAACCCCGCGCTCAAAGACATCAACTTCGAGATCGCACCTGGTGAACGCATCCTG
CTCACCGGCGCTTCCGGCGCCGGAAAATCCACGCTACTCGCCGCGCTCGCTGGCGTTTTA
GGCGCTTCTGATGAGGGCGTTTCTACGGGCGAATTGCTTGTCGACGCCCCCTCCATCGGT
TTGCTTCTCCAAGATCCACATTCCCAAGTCATCGCCTCCCGCATCGGCGATGATGTGGCG
TTTGGCTGCGAAAACCTCCAAATTCCGCGCGAGGAAATCTGGCCACGGGTGGAACGAGCA
CTTGAATTGGTGGGCTTGCATCTACCACTGAGCCACCCCACGAAATATCTTTCCGGTGGC
CAAAAACAACGCCTCGCTCTTGCCGGTGTGATCGCCATGGGTGCTCGTCTGATTCTGCTT
GATGAACCCACCGCAAACCTTGATCCTCAAGGCCAAAAAAATGTGGTCGCAGCACTGGAT
CGCGTTGTTCAGGAAACTGGAGCAACACTCATCGTGGTGGAACACCGCCATGAGCTGTGG
GTCAACATCATTGACCGGATCATCAGTATTACTGACGGCGAAGATGTCCAACCTGCAGAG
TTGATCAAGGTGGGCCAGTTGCCTGGGGCGCAGCCGTCGACAAGCAAACCGATCTTGTGG
GCGAATGATTTGCTGTGCACCTGGGGCGGCCTGCGTAGTTTTGAGGTGCCGGAAGGCGCC
TCGACGGTGATCACCGGGCCGAATGGCGCTGGAAAATCCACACTTGCGCTGACCATGGGT
GGATTGCTTCCGCGAAAAGTGGGCAGCTGGAACTCTCTGACACGGTGCGCGGCGGCCTTA
ACACGCCCCCGCACAAGTGGCGTTCAGCTGATC
>RXN02945-downstream
TAGCTGCACGTATTGGCACTGTC
>RXN02975-upstream
TCGTCGGTGCAGTCCTCGGATTGCTTAAGTTGTAGGTGGCTGGGGGCGTCGAAAAGCAGC
TTTATTGACCTGGCAACTTCAATTGATAGACTGTTAGGTT
>RXN02975
GTGATTGTCACCAATGATTTAGAGGTGCGCGTTGGCGCACGTACCCTTCTCGATGCCCCA
GGTCAGCTCCTTCGGGTGCAGCCAGGCGACCGTATTGGTCTGGTTGGTAGAAATGGTGCG
GGCAAAACCACCACCATGCGAATCCTCTCGGGCGAAACCAAGCCCTACGGAGCATCCGTA
ACCACATCTCGTGAAATCGGTTACCTGCCCCAGGACTCCCGCGAAGGCAACATCGAACAA
ACCGCCCGC
>RXN02994
ATCAAGATGACGGGAGTGCAAAAATACTTCGGCGACTTTCATGCCCTTACGGATATTGAT
CTTGAAATTCCCAGAGGACAAGTTGTCGTCGTACTTGGACCATCCGGATCCGGCAAGTCA
ACCCTTTGCCGCACGATCAACCGTCTCGAAACCATCGAGGAAGGCACCATCGAAATCGAT
GGAAAGGTTCTCCCAGAAGAAGGTAAAGGCTTAGCCAATCTCCGCGCCGATGTCGGAATG
GTATTCCAGTCCTTCAACCTCTTCCCCCACCTCACCATCAAAGACAACGTCACTCTTGCA
CCCATCAAAGTGCGAAAGATGAAAAAGTCTGAAGCCGAAAAGCTTGCGATGAGCCTGTTG
GAACGCGTCGGCATCGCAAACCAAGCTGATAAATATCCGGCGCAACTGTCCGGCGGTCAG
CAACAGCGTGTGGCCATCGCGCGCGCACTTGCGATGAACCCAAAGATCATGCTTTTCGAC
GAGCCCACCTCCGCCCTTGACCCTGAAATGGTCAACGAAGTGTTGGACGTCATGGCAAGC
CTTGCCAAGGAAGGCATGACGATGGTGTGTGTTACCCACGAGATGGGATTCGCACGCAAA
GCAGCCGATCGTGTGTTGTTCATGGCGGATGGGCTCATTGTGGAAGATACGGAACCAGAT
TCCTTCTTCACCAACCCTAAGTCTGATCGTGCAAAAGACTTCCTCGGCAAGATCCTTGCC
GAG
>RXN02994-downstream
TAGTTTTTGGCTGCGCCTCTATC
>RXN03020-upstream
CGCCGCAGCAGGACTCATCGGTGCCGCCATTTCACTCGGCCCCATCCTTCGCGTCGAACC
ACGCTCCGCACTCATGAACGCATAAGAAAAGGAACCTCAC
>RXN03020
ATGACTCTCCACGTTTCAAATCTCAATCTGACCGTCGCCGACGGATCCACCTCACGCACC
GTGCTCAACAACATACACTTTTGGATGTCCAACCAGGCGAAGTCGTCGGTATCACCGGCC
CATCCGGGTCCGGAAAATCCACCCTACTCGCCGTCCTCGGCTGCCTCCAAAGCGCCCGAT
TCCGGCACCGCGACGCTCGGCGACATCGACCTGGTCAACCCGCAAAACCGAGCTGCTTTA
CGACGCAACCACCTAGGAATTGTCTTCCAACAGCCAAACCTGCTCCCCTCGTTGACTGTC
CTCGACGAAGTGCTGCTCATTGCCCGGCTCGGCAGGATCCTCCCGGCCAGCCGCAGCGCA
CGCACCCAACACAAAGACAAAGCCCTTTCACTTCTGAACTCCATCGGACTCGGCGACTTA
GCAAAACGCAAGGTCAGCGAACTATCCGGTGGACAACAAGCCCGCGTTAACTTGGCCCGC
GCGCTGATGAACTCCCCCAAGCTCCTGCTTGTCGATGAACCCACCGCCGCCCTCGATCAA
CATTCCGCGAGCGAAGTCACCGAACTAATCGTCTCGATGGCCCAGCAATACAACGCCCCC
ACA
>RXN03080-upstream
CTTGCAAACAGGCGTGGTGGTGGCGTTCATTGGCTCACCAATTTTCCTTTATTTACTGCT
CAGCATGCGCAAGCGACGCGGATTGGGGCTGTAAAAACTC
>RXN03080
ATGCCTCAATTAGTTGAAATTCGTGATCTCAACGTTGAATTCCCCTCTCGCCATGCAGTG
AAAAACGTGTCTTTTTCTGCACCTGCTGGAAAAGTCACCGCACTGATTGGCCCAAATGGT
GCTGGTAAAAGTACTGCCCTTTCGGCGATTGCAGGATTGGTTGAATCCACCGGCGAGGTA
ATGGTTGGTGGGAGTGGGGTTGCGTCGAAAAGCGCTAAAGCCCGAGGCCGCCTGCTGTCA
CTCGTGCCGCAAAACACCGAGTTGCGCATTGGTTTTAGTGGACGCGACGTTGTCGCGATG
GGCCGCTACCCGCATCGTGGCCGCTTCGGCGTGGAGACCGACGCAGATCGACGCGGCACC
GATGACGCCCTGCGCGCCATCAACGCGCTCGACATCGCCGAGCAGCCCGTCAACGAATTA
TCGGGCGGCCAGCAGCAGCTCATCCACATCGGCCGAGCGCTCGCCCAAGACACCGCGGTC
GTGCTTCTCGACGAGCCCGTCTCCGCGCTTGATCTACGGCACCAAGTTGAAGTCCTTCAA
CTCCTGCGCGCCCGAGCTAATTCGGGCACCACCGTGATCGTCGTCCTTCACGATCTCAAC
CACGTTGCCCGTTGGTGCGACCATGCAGTGTTGATGGCCGACGGCGAAGTTGTCTCCCAA
GGTGACATCCGCGAGGTGCTCGAACCTGCCACACTGTCCACCGTGTAGGGACTGCCCATT
GCGGTGCGCGATGATCCCGAAACCAGCTCACTTCGCGTGATCCCGCATCCAAATCGCTTT
>RXN03080-downstream
TGATTGAAACTTTGACTTAAAAA
>RXN03081-upstream
ACGGACTGCCCATTGCGGTGCGCGATCATCCCGAAACCAGCTCACTTCGCGTGATCCCGC
ATCCAAATCCCTTTTGATTGAAAGTTTGACTTAAAAACCC
>RXN03081
ATGAAAAAATCACTCATCGCCATTGTTGGCAGTGCGCTCGTGTTAAGCGGCTGGACCTCT
GATTCTTCTGACTCTTCCGGCACTTCCGGAACTGTGGAAACCACTTCGATTACAACCAGC
GTTGCCGCAGCTGACGGCGCATTCCCACGCACCGTCACACTCGACGATTCCTCCATCACC
TTAGAATCCAAACCAGAGCGCATCGCCGTACTCACCCCAGAGGCAGCATCCTTGGTTCTC
CCCATCACAGGCGCCGACGGCGTCGTGATGACCGCCGAAATGGACACCGCTGACGAAGAA
ACCGCAGCTCTGGCCTCCCAAGTGGAATACCAAGTCAAAAACGGTGGCAGGCTCGACGCC
GAACAAGTTGTCGCCGGCGACCCAGATTTGGTGATCGTCAGTGCGCGTTTCGATACCGAA
CAAGGCACCATCGACATTTTGGAAGGCCTCAACGTCCCG
>RXN03081-downstream
TAGTTAACTTCGATTCAGACGCT
>RXN03108-upstream
CAACCAGCCTGCCACGTTGCTGGATGGACCGTCGTAATCATCGGCATCACCGGCTTAATC
CTTGACCACCTCATCGGTGAGTTGCAGAAAGTAGTTCGCT
>RXN03108
ATGACTAAACCAAACGCTTCCGTCGAGCTGAATACGATCACCAAGTCCTACGGCTCCACC
ACTATCATTGGCGATACGAGCATCACCATCAACGACGGTGAATTCGTCTCCCTCCTCGAC
CCTTCCGGCTGCGGAAAATCAACAATTCTCAAAATGATCGCCGGACTGGCCTCCCCATCC
ACCGGCACAGTCAGCGCAGGCAACGAAGAAATTAAAGGACCAGGACCTGACCGAGGCATG
GTTTTCCAAGACCACGCCCTCCTGCCC
>RXN03108-downstream
TGATTGACCGCACGCGGCAACAT
>RXN03116-upstream
AGGGGAATGGCTTAATATCGTAGGTCCCAACGGCTGCGGAAAGAGTACGTTGCTGCACGC
TTTTGCTCAGGTACTGTCACTGGAATCGGGAAGGCTGAAA
>RXN03116
ATGGGGGAGGGGGACGTCGAAAAGGATTTTGCTTTTGGTCTTAAAGCTGCGAAGCAGCGT
CGCTTTTTCGCGCGTACCGTGGCGCTCATGCCACAGAATCCTACTATTCCTGCAGGTCTG
AGCGTTTTTGATTATGTGCTGCTGGGGCGTCATCCGCACAGTTACGCGCCGGGGCGTGCT
GATGATGAGATCGTGAAGCGGTGCCTCGCTGATCTGAAATTGGAGCATTTCAGCGACCGC
GGCTTAGACGAATTGTCCGGCGGCGAGCGTCAACGCGTCAGCCTTGCCCGCGCGCTCGCC
CAAGAACCGCGCATCGTGCTTCTCGACGAGCCGACCTCCGCGCTTGACATCGGCCATGCG
CAGGAAACGCTTGAGCTTATCGACGCCATCCGGCACCGACTCGGCCTCACCGTGATCGCG
GCGATGCATGACCTCACCCTGACTGCGCAATACGGCGATCGGGTGCTCATGATGAATGGT
GGCCGCAAAGTTTTCGAGGGCACTGCAGCCGAAGTGCTCACCGCGGAGCGGATTTCGGAG
ATTTATGATGCCACTGTGATTGTTGAGGTTATTGATGGGCGTCCCGTGGTGATTCCGCAA
CGGTCGCAC
>RXN03116-downstream
TGACCTGTTGTGGCAGACGAGAC
>RXN03129-upstream
GCTGAGGTTGAGACCAAGCTGAACACCATCTACACCCGCGACATCGAACCACTTATTTAA
TCCGAGCACTTCAGCTACACCTATTTAAGGAGGCTGTGAC
>RXN03129
ATGGCGTCAATCGTCTTTGAAAACGTCACACGCAAATACTCTCCGGGCGCACGCCCGGCC
GTCGACAAGCTTAATTTGGAAATCGCCGACGGCGAGTTCCTAGTTCTCGTTGGACCCTCA
GGCTGTGGAAAGTCCACTTCTTTGCGCATGCTGGCTGGTCTTGAGCCTATCGACGAGGGA
CGTCTACTCATTGATGGTAAAGACGCCACGGAACTGCGTCCGCAGGATCGTGACATCGCT
ATGGTCTTCCAGAGCTACGCGCTGTACCCGAATATGACTGTTCGGGACAACATGGGCTTT
GCGCTGAAGAATCAGAAGGTGGCTAAGGCTGAGATCGAAAAGCGTGTTGCTGAAGCCTCA
CGCATTCTGCAGCTGGATCCGTATCTTGATCGTAAGCCTGCAGCTTTGTCTGGTGGTCAG
CGCCAGCGCGTGGCCATGGGCCGTGCAATTGTGCGTGAGCCATCGGTGTTCTGCATGGAT
GAGCCACTGTCCAACCTAGATGCGAAGCTGCGTGTGTCTACGCGTGCGGAGATCTCTGGT
TTGCAGCGTCGCATGGGCGTGACCACGGTGTATGTGACTCACGATCAGGTCGAGGCCATG
ACCATGGGTGATCGCGTCGGTGTGCTTTTGCTCGGTGTGCTGCAGCAAGTAGACACCCCG
CAGAACCTGTACGACTACCCAGCAAATGCGTTCGTCGCCAGCTTGATTGGTTCCCCTTCC
ATGAACTTGATTGAGGGCACCATCCGTGGCGATAAGGTCACTTTGGGTACTGGAATTCAG
ATTTCAGTTCCTGATGAGGTGGCAGCAGAGGTTCGCAACAACCCGGATCGGTTTGAGGGT
CGTCCAGTCATTGTTGGTGCTGGTGCGGAGCACATGTATTTGACCACGGCGAATGAGAGT
GGTGCTGTATTGGGCGAAGTCAGGGACATTGATGAGCTCGGCGCGGATTCAATGGTCTAC
GTATTGGCGTGTGGTGTGAAGAACGCGAATACTGATCTTTTGGGTGAGGGGATTCCAGAG
GATATGCGCGTGACCGTTGTCGGTGCTGAAGAGACCGATAAGGCCCGGCTGGGTATTCGT
GTTGAGCGCCATCACGGTCTGAAGGCCGGCGATAAGGTGCACGTTGTTGCTGCACCGAAG
GATGTTCACCTCTTCGACGGTCTTGATGGCCGTCGAATGGGTGCATCGGTTGTAGCTCCA
GCCCATACAGTCCAGTCTGGTCAC
>RXN03129-downstream
TAGATTATTTACCAGTGCAACTC
>RXN03164-upstream
CTTTTTTGCATCCAGATGCACAAAGCCGTGGCAGAAACGAGACAAACTGAGCACAATGGC
TGTCATGGCATATCAACCAGCAGACAATCGCTATGACGAC
>RXN03164
ATGATCTACCGCAGGGTGGGAAATTCTGGGCTGAAGCTTCCGGCAATTTCGCTTGGGGTG
TGGCACAACTTCGGTGATGACAAGCCGCTTTCAACGCAGCGCAGCATTATTCACCGCGCG
TTTGATAGGGGAGTCACTCACTTCGATTTGGCTAATAACTATGGACCTCCAGCAGGTTCC
GCAGAGACCAACTTTGGCAGGATTTTGCGTGAGGATCTCAAAAGCCACCGCGATGAGTTG
ATCATTTCTTCCAAGGGGGGTTGGGATATGTGGGCTGGACCTTATGGTTTTGGTGGTTCG
CGAAAGTATCTAGTGAGTTCCGTTGATCAGTCCCTGACTCGCCTCGGCTTGGATTACGTG
GATATTTTCTATCATCACCGCCCGGATCCAGATACTCCTTTGGAAGAAACCATGTACGCA
TTGCGTGACATTGTTGCGTCTGGAAAGGCTCTTTACGTGGGTATTTCTTCCTACGGTCCA
GAGCTCACAGCGGAGGCGGCTGAGTTGATGGCGGAGGAGGGCTGCCCGCTTCTGATTCAT
CAGCCAAGCTATTCCATCATTAATCGTTGGGTGGAGGAACCGGGCGATGACGGTGAGAAC
TTGTTGCAGTCAGCTGCCAACAATGGTCTTGGCGTCATTGCTTTCTCACCACTTGCGCAG
GGCCTGCTCACGGACAAATATCTCGATGGAATTCCAGAGGGTTCCCGCGCCAGCCAGGGT
AAGTCCCTGTCTGAGGGCATGTTGAACGTGAACAATATTGATATGGTCCGCAAGCTCAAT
GACATCGCCCAGGAACGCGGGCAGTCACTTGCGGAGATGGCGCTTGCATGGGTGCTGCGC
GAGCAAAGAGAGTACGGCGCCGGATTACCG
>RXN03164-downstream
TGACCAGTGCATTGATTGGTGCT
RXS00088-coding Region
ATCGAAGACAACCACGGGACCGAAGGGATCTCCCTGCCAATCGAGGGCGTCGCTGCGACCGACAACCGC
GCATTCGAACTGCTTGATCGCTGGGGTGTAGAGCTCGTTGCAGCTCCACTTCAGCTGGTTCCATTTACC
GTTACGGGCTACACCGAAGAGGGCGGGGTCGCTAACCTTGGCTCCCACGGCGAGCCAGACCTGGAAGCA
CTTGCTGCTGCACAGCCTTGCCTGATCATCAACGGCCAGCGCTTGGCTCAGTACTACGATGACATCATT
GCCCTGAACCCTGACGCAACCGTTGTTGAGCTAGACCCACGCGATGGCGAGCCACTTGACGAGGAGCTT
ATCCGGCAGGCTGAAACCCTCGGTGAGATCTTCGGGGAAGAAGAAGATGCTGCAAAGATCGTTGCTGAT
TTCGAGTCCGCACTTGAGCGCGCTAAGACCGCATACGCAGCAATCTCCGACCAGACCGTCATGGCAGTT
AACGTTTCCGGCGGAAACATTGGCTACATCGCTGCTTCCGTTGGACGCACCTACGGTCCAATCTTCGAC
CTGGTTGGACTCACCCCAGCACTCGAGGTTGGCAACGCGTCCTCCGACCAGGAGGGCGACGACATTAAC
GTCGAAGCAATCGCAGCTGCAAACCCAGACCTGATCCTGGTCATGGACGGCGATGGTGGCACCAGCACC
CGCAACGAAGCTGATTACGTTCCAGCAGAGCAGATGGTCTCCGACAATGAAGCACTGGGAAACGTCAAG
GCTGTCACCGACGGATACGTTTACTACGCACCTGCAGATACCTACACCAAGGAAAACATCATCACCTAC
ACCGAGATCCTCAACGGCATGGCAGATATGTTCGAGAAGGCAGCTCAG
RXS00088-3′-Region
TAGGGGATCGATCCCACACTGAC
RXS00372-5′-Region
GCAGACATTTCCATAAGTCGTGCGAAATGCGCGCATTCATGTAAAGATGTTATTTCCTCCCCCAAACAC
TCCTTAAAATTTCAAGAAGGGCCTTATTTTC
RXS00372-coding Region
ATGTCTTCGAAGCACCCTTTGAAGCGGAGTGCCGTTACTGTTTTTGGACTCGGCGCTTGCGCTGCTCTC
CTCGTGGCTTGCTCTGAAGCTTCTGAGGACGTTTCCAGCGCAGAGACCACCACTGCAAGCTCTTCCGCT
AACGCATCCGATGCAGCCGGTGAAAAAGTAACGATCACCGTCTACACCTCTGAGCGTGAGGAAAAGGTC
GATGAGATCAACAAGGCGTTCATGGAAGCCAACCCAGATATTGAGGTTGAGGTGTAGCGCGCTGGTACT
GGCGATCTGAGTGCTCGCATTGAAGCTGAAAAGGCATCCGGTTCTATCGAGGCTGATGTGTTGTGGGCT
GCGGATGGTGCAACCTTTGAAACTTATGCAGCACAGGGCGACCTTGCAGAGCTGGAAGATGTTGAGACT
TCCGACATGATTGAAGAGGCTCTGGATGCTGAGAACTTTTATGTAGGCACCCGCATCATCCCAACCGTG
ATTGCATACAACACTGAAGTTGTTGATCAGGCTGAGCTTCCTACGTCTTGGGCTGATCTGACTGATCCT
AAGTATGCAGGCGAACTGGTCATGCCGGATCCAGCTGTGTCTGGTGCTGCAGCCTTCAATGCTTCTGTG
TGGAAGAACGACCCTGCGCTTGGCGAAGCCTGGATCACCGCCTTGGGTGAAAACCAACCAATGATCGCT
CAGTCCAACGGCCCAACCTCCCAGGAGATCGCTGGCGGTGGCCACCCAGTGGGCATCGTGGTGGACTAC
TTGGTGCGCGACTTGGCTGCTGGTGGATCTCCAATCGACACCATCTACGCATCGGAGGGTTCTCCTTAC
ATCACTGAGCCTGCAGGTGTGTTCGCTGATTCTGAAAAGAAGGAAGCAGCCGAGCGCTACATCAACTTC
CTGCTGTGTGTTGAAGGGCAGGAAATCGCAGTTGAGCAGGCATACCTGCCAGTGCGTGAAGATGTCGGA
ACTCCAGAGGGCACCCCCGAGTTGGCTGACATCGAGCTCATGACCCCTGACCTGGAGGTTGTAACCGCT
GATAAGGGGGCTGCTGTTGAGTTCTTCGAAAACGCAATGAAC
RXS00372-3′-Region
TAGTTTTCCTATGCAGTTATCTC
RXS00453-5′-Region
TAGTGGGGCGTGAAAAAATAGCTGATTTAAGAGGAGAAGCAACCCCGTGGCGAAATTGCTATTCAGGTT
GGGGCGATGGTCCTATAATCGCAAGTGGATT
RXS00453-coding Region
GTGATTTCGGCATGGCTAGTTATTTTGGCCATTGTTGGTGGTCTGGCCCTGACGATGCAGAAGGGGTTG
AGTAACTCTTTCACTATTGAAGACACCCCTTCGATTGATGCCAGTGTTTCTCTGGTTGAAAATTTCCCT
GATCAGACGAACCCGGTGACGGCCGCGGGAGTTAACGTGGTTTTCCAATCCCCGGAAGGAACCACGCTT
GATGATCCTCAGATGATGACTGCGATGGATGCAGTCGTTGATTACATTGAGGACAATTTGCCTGATTTT
GGTGGGGGAGAGCGCTTCGGCAATCCTGTTGAGGTGTCTCCTGCGTTGGAAGAGATGGTCATCGAGCAG
ATGACCAGCATGGGGCTTCCTGAGGAAACCGCTGCAAAGGATGCTGCCAATCTGGCGGTGTTGAGCGAA
GACAAAACCATTGGCTACACCTCTTTCAACATTGATGTTGAGGCCGCAGAATATGTGGAGCAAAAACAC
CGCGATGTGATCAACGAAGCGATGCAAATCGGTGAAGATTTAGGTGTCCGGGTGGAAGCCGGTGGACCT
GCTTTCGGTGATCCAATTCAGATTGAAACCACCAGTGAGATCATCGGTATTGGCATCGCGTTCATCGTG
TTGATTTTCACCTTTGGTTCTTTGATTGCTGCAGGCTTGCCTTTGATTACCGCGGTGATCGGCGTGGGC
ATTGGTGCGCTGGCAATTGTGCTGGCCACGGCGTTTACTGATCTCAACAATGTGACTCCAGTGCTCGCA
GTGATGATTGGCCTGGCCGTGGGCATTGACTACGCGCTGTTTATTTTGTCTAGGTACCGTGCGGAGTAT
AAGCGCATGCCACGTGCCGATGCTGCCGGAATGGCGGTGGGCACAGCTGGTAGTGCGGTGGTGTTTGCT
GGCGCGACGGTGATTATCGCGCTGGTAGCCCTCATCATTGCGGATATCGGATTCCTCACGGCCATGGGT
ATTTCTGCGGCGTTTACGGTGTTCGTGGCTGTGCTCATTGCGTTGACGTTTATCCCGGCGCTGTTGGGT
GTGTTTGGTGGTCATGCGTTCAAGGGCAAGATCCCTGGAATTGGTGGAAACCCAACGCCAAAGCAGACG
TGGGAGCAAGCGCTTAATCGTCGTTCGAAGGGTCGCTCATGGGTCAAGCTTGTACAGAAAGCACCGGGT
CTTGTGGTGGCAGTGGTGGTCTTGGGTCTTGGTGCCTTGAGCATTGCTGCAATGAACCTGCAGTTGTCA
CTGCGTTCTGACTCCACCTCCAATATTGATACCACTGAGCGTCAGTCGGCTGATTTGATGGCAGAGGGC
TTTGGCGCGGGCGTTAATGCGCCGTTCTTGGTCATCGTCGATACGCATGAGGTCAATGCTGATTCCACC
GCATTGCAGCCACTGATTGAGGCACAGGAGCCTGAAGAGGGCGAGTTCGATCGGGAGGAGGCGGCTGGT
TTTGCTACCTATATGTATGTCACGCAGAGCTACAATTCCAACATCGATGTGAAGAATGCGCAGATCATC
AGCGTCAATGATGATTTCACTGCGGCGCAGATTCTCGTGACTCCATACACCGGACCTGCGGATAAAGAG
ACCCCTGAGTTGATGCACGTGCTGCGTGCGCAGGAAGCTCAGATTGAGGATGTTACGGGAACTGAACTG
GGTACCACTGGGTTTACGGCGGTTCAGTTGGACATTACTGAGCAGCTGGAAGACGCAATGCCGGTTTAC
CTCGCTGTGGTTGTTGGTTTGGCTATTTTCCTCCTCATTCTGGTGTTCCGTTCCCTGCTTGTTCCGCTG
GTTGCTGGCCTTGGCTTCTTGTTGTCTGTGGGTGCGGCCTTCGGTGCGACGGTGTTGGTCTGGCAGGAG
GGCTTCGGTGGCTTTGTGAACACCCCTGGTCCGCTGATTTCCTTCATGCCGATCTTCCTCATCGGCGTG
ACCTTCGGTTTGGCCATGGACTATCAGGTGTTCCTTGTGACTCGCATGCGCGAGCACTACACCCACCAC
AATGGCAAGGGACAGCCTGGTTCCAAGTACACCCCGGTTGAGCAGTCAGTGATTGAAGGCTTCACGCAG
GGCTCCCGCGTGGTTACAGCAGCGGCACTGATCATGATTGCCGTGTTCGTGGCGTTTATTGATCAGCCG
TTGCCATTTATTAAGATCTTCGGTTTCGCGTTGGGTGCGGGCGTGTTTTTCGATGCTTTCTTCATTCGC
ATGGGTCTGGTCCCCGCGTCGATGTTCCTGATGGGCAAGGCCACGTGGTGGATGCCTAAGTGGCTGGAT
CGAATTCTGCCAAGTTTGGACATTGAAGGCACCGCACTGGAGAAGGAATGGGAGGAGAAGCAGGCTGCA
CGT
RXS00453-3′-Region
TAGACTTGGCACCTATGTCAGAT
RXS00479-5′-Region
TAGATCCCAAGGCTCAAAATTTATTACTTAAACAAGTTGAGCAACTAGCCAGCCGCAAATCTTAGAACT
AACCTTTACGCCTTTAACGGAAGTGAATTTG
RXS00479-coding Region
ATGTCTACTAGCATCACAACAGAGAACAAGAAGAAATCTGGTCCTCCTCGCTTGATGAGAATCTTTCTG
CCCGCCTTGCTAATTTTAGTTTGGCTTGTAGGAGCTGGAGTCGGCGGTCCTTATTTTGGCAAGGTTAGT
GAGGTCTCCTCCAACAGCCAGACCACATATCTGCCAGAATCTGCCGATGCCACTCAAGTACAGGAACAG
TTGGGAGATTTTACTGATTCTGAATCCATCCCAGCCATTGTCGTAATGGTCAGCGATGAACCCTTAACA
CAGCAAGACATCACACAACTCAATGAAGTTGTTGCTGGGCTTTCAGAATTAGACATAGTTTCCGATGAA
GTCTCCCCTGCTATTCCATCCGAGGACGGCAGAGCTGTCCAAGTGTTTGTCCCCCTCAATCCATCAGCG
GAGCTGACGGAAAGCGTCGAGAAGCTCTCTGAGACCTTGACCCAGCAAACGCCGGACTATGTGAGCAGC
TATGTGACCGGACCGGCTGGGTTTACCGCTGATCTCAGCGCAGCTTTCGCGGGTATTGATGGGCTAGTC
CTAGCAGTCGCCTTGGCTGCCGTCCTTGTCATTCTTGTCATCGTCTATCGCTCCTTCATTCTGCCCATC
GCCGTGCTTGCCACCAGTTTGTTTGCGCTGACTGTAGCTCTATTGGTGGTGTGGTGGCTAGCTAAGTGG
GACATCCTGCTGCTTTCGGGTCAGACTCAAGGCATCCTCTTCATTCTGGTCATTGGCGCCGCCAGCGAC
TACTCATTGCTATACGTTGCTCGTTTCCGTGAAGAGTTACGCGTTCAACAAGATAAAGGGATAGCCACA
GGGAAAGCCATCCGGGCATCGGTGGAACCCATTCTTGCCTCGGGCAGCACTGTTATTGCGGGCCTCCTT
TGTTTGCTATTTAGTGATTTGAAATCTAACTCCACGCTAGGTCCAGTAGCTTCGGTGGGCATTATTTTT
GCAATGGTTTGTGCTCTTACTCTGCTACCAGCCCTGCTGTTTGTATTCGGTCGGGTGGCCTTTTGGCCC
AAGCGACCAAAATACGAACCTGAAAAAGCGCGTGCGAAAAACGACATCCCCGCCAGCGGGATCTGGTCA
AAAGTGGCTGATTTAGTGGAGCAGCATCCTCGTGCAATCTGGGTATGTACACTTATTGTGGTTCTCTTG
GGTGCGGCTTTCGTTCCCACACTAAAAGCGGACGGTGTGTCCCAATCCGACCTAGTTCTGGGTTCCTCT
GAAGCACGTGATGGCCAGCAGGCTTTAGGCGAACACTTCCCCGGTGGATCCGGCAGTCCTGGTTATATT
ATCGTTGATGAAACACAGGCAGCACAGGCTGCTGACGTAGTCCTTAACAACGACAATTTCGAGACTGTA
ACTGTAACTAGTGCTGAGTCCCGCTCTGGCTCAGCCCCAATCACCGCTGACGGTATTGTGCCGTTAGGT
TCTGGTACAGCTCCAGGCCCGGTAGTTGTAGAAGGGCAAGTCCTTTTACAAGCAACACTTGTCGAAGCA
CCAGATTCCGAAGAAGCTCAAAAAGCTATTCGCAGTATCCGCCAAACTTTTGCAGATGAAAATATATCA
GCGGTAGTAGGCGGTGTCACTGCAACTTCCGTAGACACTAACGATGCCTCCATCCATGACCGCAACCTG
ATCATCCCAATTGTATTGCTGGTCATTTTGGTTATTCTCATGCTGTTGCTGCGGTCTATTGTCGCACCA
CTCCTGCTAGTAGTCACCACCGTGGTGTCTTTTGCTACTGCTTTAGGCGTGGCTGCTTTACTTTTCAAT
CACGTTTTCAGTTTCCCAGGAGCAGACCCCGCAGTACCTCTCTACGGATTTGTATTTTTAGTAGCCTTG
GGCATCGACTACAACATTTTCTTAGTCACCCGAATCCGTGAAGAAACCAAAACCCACGGCACAAGACTT
GGAATTCTTCGAGGCCTGACAGTAACCGGCGGAGTAATTACCTCAGCTGGAGTAGTTCTCGCCGCAACG
TTCGCAGCACTCTATGTCATCCCAATTCTATTCCTGGCACAAATTGGCTTCATTGTCGCTTTTGGAGTT
CTTATTGATACCCTGCTCGTTCGCGCCTTCTTGGTGCCTGCTTTGTTCTACGACATCGGACCGAAAATC
TGGTGGCCGTCAAAATTGTCCAATCAGAAATACCAGAAGCAGCCTCAGCTA
RXS00479-3′-Region
TGACACACCAAAATTCGGCTGTC
RXS00654-5′-Region
CAGCAATAGCGATTATTGCTTGATTGTGTGTTTTTAGATCTTCGGTTCTCTTCACTCAACTGCTGTGAA
GTGCCACCTGTTTGGAAAGGCGAACACGATA
RXS00654-coding Region
GTGCTCGATATTTTGATTTACCCGGTGTCTGGAGTGATGAAGCTGTGGCACCTGCTTCTTCACAACGTT
GCGGGTTTGGACGATTCACTGGCGTGGTTCTTTTCCCTTTTCGGCCTTGTCATCACGATCCGTGCAATT
ATCGCGCCTTTCACCTGGCAGATGTATAAGTCGGGCCGCACTGCCGCACATATTCGTCCTCACCGCGCT
GCGCTCCGGGAAGAATACAAGGGAAAGTACGATGAAGCGTCCATTCGGGAGTTGCAGAAGCGCCAGAAT
GATTTGAATAAGGAATACGGCATTAACCCGCTGGCAGGTTGTGTGCCTGGGCTGATCCAGATACCGATT
GTCCTTGGTCTTTACTGGGCACTTCTCCGCATGGCTCGCCCTGAAGGTGGTTTGGAAAATCCCGTCTTC
CAGTCGATCGGCTTCCTAACTCCTGAGGAAGTGGAATCTTTCCTCGCTGGTCGCGTGAGCAATGTGCCT
CTGCCCGCTTATGTTTCGATGCCCACTGAGCAGCTAAAATATTTGAGCACCACGCAGGCGGAAGTTCTT
AGTTTCGTTTTGCCACTGTTCATCACAGCCGCAATCCTCACCGCAATCAACATGGCGATGTCCATGTAC
CGCAGCTTCCAAACCAACGATTACGCATCCGGATTCTCTAACGGCATGCTGAAGTTCATGATCGTGATG
TCGATCCTCGCGCCGATCTTCCCACTGTCCCTTGGCCTCACAGGAGCATTCCCCACAGCAATCGCACTC
TATTGGGTGAGCAACAAGCTGTGGACGCTCCTCCAAACAATCATCATGATGGTCATTTTGGAACGCAAA
TACCCACTTACCGACGATTTCAAAGTGCACCACCTAGAGCAGCGCGACATCTACCGCGCAAAACAAAAA
GAAAAGCGCATCTTGCTGTGGACACGACGCAAAAACCGCGCCCTGATGATTCTCACCGCATGGAACGCC
TCAACGCTTCACGCAACAAACGTGGAACTCACGAAAAGCCGTACTGCCGAAATCAACGAAGCAAAACAG
GCCCGCAAAGAAATCGCGAACAAGAGGCGCGAAACGCAACGTGAAATGAACCGCGGCGCCATGCAGCGC
TTAAAGCAGCGTCGGGCTGAGGTTAAAGCTAAAAAGAAGGGGCTTATCGACGCCTCCCCCAACGAAGAT
ACCCCTTCGGAAAATGAAGAAACTAAATTGAGTAGTCCGCAGGTGGAGCCGACAACAACTGCCGAGCCA
AATCGCGAGCCGTCTCAAGAGGAC
RXS00654-3′-Region
TGATGTTGTGGACCAATCGAGAT
RXS0075B-5′-Region
TTCAAGTTTGGCTGTGACTCATGTCGCACATAGTATTTCAATCACCGGATCCGCAGGATTGCAAAATGC
TGGGGAATATTCATAACAACGGAGGTCAGTC
RXS00758-coding Region
ATGACTTTGAAGAAGTCTCTCGCTGTAACCACGGCGGCTGCACTTGCTTTGAGCCTTGCCGCTTGGTCG
TCCGACTCCTCGTCCGACAGCTGCTCATCCTCATCAGGCAGCGAAGGCGGCGACAACTACGTCCTCGTC
AACGGCACTGAGCCAGAGAACGCGCTCGTCCCAGGCAACACCAACGAAGTAGGTGGCGGTCGCATGGTC
GACAGCATCTTCTCCGGCCTGGTCTACTACGACGTCGAGGGCTCCCCTGTCAACGATGTTGCAGAGTCC
ATCGAACTCGAAGGTGACAAGACCTACCGCATCACCATCAAAGACGGCCAGACCTTCACCGATGGCACC
CCAGTTACGGCTGAGAGCTTTGTCAACGCATGGAACTACAACGTAGCTAACAGCACGCTGTCCTCCTAC
TTCTTTGAGTCCATCGTCGGCTACGAAGAAGGCGTCGAGTCCATGGAAGGCCTCCAGGTCGTCGACGAC
ACCACCTTCACCGTCGAGCTCACCCAGCCTGAGTCCGACTTCCCACTGCGCCTGGGATACTCCGCATTC
TTCCCGCTTCCTGAATCCGCATTTGACGACATGGACGCATTCGGTGAGAACCCAATCGGCAACGGTCCA
TACAAGCTCCAAGAGTGGAACCACAACCAGGACGCCACCATCGTTCCTAACGCGGACTACACCGGTGGA
CGCCAGGCTCAGAACGACGGCGTGAAGTTCATCTTCTACCCAACCTTCGACTCCGCTTACGCGGACCTG
CTCTCCGACAACTTGGATGTGCTGGACGCTATCCCAGACTCCGCGTTCTCCTCCTTCGAGGACGAGCTC
TCTGGCCGTTCCATCAACCAGCCTTCCGCTGTGTTCCAGTCCTTCACGATCCCGGAGAGCCTTGAGCAC
TTCTCCGGCGAAGAAGGCGTGCTGCGTCGCCAGGCCATCTCCTTGGCCGTCAACCGCGACGAGATCACC
CAAACCATCTTCGAAGGGACCCGCACCCCAGCGACGGACTTCACCTCCCCTGTCATCGACGGACACTCT
GATTCCCTCCAGGGCGCAGATGTCTTGACCTACGATCCAGAGCGCGCTCAGGAACTGTGGGCACAGGCA
GACGAGATCAGCCCTTGGTCCGGCGAGTTCTCCATCTCCTACAACGCAGACGGTGGACACCAGGCATGG
GTGGACGCAACCGCCAATTCCATCCGCAACACCCTGGGTATCGACGCCATCGGCAACCCATACCCAGAC
TTCAAGTCCCTGCGTGACGATGTCACCAACCGCACCATCAACGGCGCATTCCGCACCGGCTGGCAGGCA
GACTACCCGTCCTTGGGGAACTTCCTCGGACCTTTGTACGGCACCGGTGCAGGCTCCAACGATGGTGAC
TACTCCAACCCAGATTTCGATGCCAAGGTCGCCGAAGCAGCAAACGCGGCCGATGTTGACGCATCAACC
CCGCTATACAACGAAGCACAGGAAATCCTGCTCCAGGATCTGCCAGCGATCCCAACTTGGTACTCCAAC
GCAGTTGGTGGATACTCCACCAACGTGGACAACGTGGAATTCCAGTGGAACTCGCAACCTGCGTACTAC
CAGATCACCAAGAAC
RXS00758-3′-Region
TAGTAGCTTCGGACCACCCGCTC
RXS00912-5′-Region
CCACACCTTTGAAAGGAGCTAAGGG
RXS00912-coding Region
ATGGACAACAGCGTCTACACAGCAGGCCTCACAATCGCAGCTGCCTTTTTCATGCTGTCGTTCATCTTC
ACCATCTACCGCATCATCGTCGGGCCCAACTCCATCGATCGCCTACTCGGCCTGGACGGAACCGTCTCC
ATGATTCAATGCTCCATGGCCACCTACATCTGCTGGACACTCGACACCACCGTCACCAACTTCATGATG
GTCATCGCACTCTTAGGATTCATCAGCTCTGTATCCGTAGCCCGCTTCCGCAAGAGGGATGGTGCC
RXS00912-3′-Region
TAAATGACCCTGCAACTATTCAC
RXS00932-5′-Region
CCCAATTAATTTATGCACTTCGGTGAGGTTACTCACAAAGAGTAGCGTGCAAAGCCCAGCAATAAGGTG
ATGTTTCAACGATTAGGTTACGGTAGGGGCC
RXS00932-coding Region
ATGACGGCACAGAAACTTCACCGTTTTGCAGCCCTTTTAGAAATGGGTACCTGGACCCTGCTGATCATC
GGCATGATCTTAAAATACAGTGGAGTGACAGACGCCGTAACCCGTATTGCCGGCGGTATCCACGGGTTT
GGCTTGCTCTGTTTTGCAGCCATCACCATCACCGTGTGGATCAATAATAAGTGGACATTCCCGCAGGGT
ATCGCAGGTTTGATCGTCTCTGTTATCGCGTGGGGTGCATTGCCATTTGCATTGTGGGGAGACAAGAAG
GGCCTCGTTGGCGGCGGATGGCGCTTTTCAGATCGGTGGGAAAAGCCACACACTTTCTTTGACAAGATC
TTGGCTCAATTGGTCAGGCACCCAATCGGATCCATTTTAATTCTGCTGGTGATTATCGCCGTCGTCTTG
TGTATGTTGCTGGCGATGGGACCACCTTATGATCCAGATGCCATCGCAAACACTGTGGAT
RXS00932-3′-Region
TAAACAACAGCCTCCTTCACATG
RXS01346-5′-Region
AAGGTGTGGTGAGTCACTGGCTAGATTTGATTTGTTGGCCATACCAAATCGGCCCACACAGGCACGTTG
CAAACAGGAACGCTCACCCATAGGAGATTTA
RXS01346-coding Region
ATGCGCACAGCCACAAAAGTCATCGCAACAGTGATGGCCTCAACCCTGGCTATCGGGCTGGCATCTTGT
TCCAGCTCTAGTGGCACCGCAGACGTGAATTAGGTATCCGTCAACGGCACCGAACCTCAGCGCGGACTC
ATCCCGGGCGACACCAATGAAAACGGCGGTGGGCGAGTGGTGGACATGCTGTACTCTGGGCTCGTCTAC
TTTGATGAAGCTGGCGTTGCTCAAAATGACCTGGCGGCATCAATTGACCAGGAAACAGACACCACCTAC
AAAATCACTTTGCGTGATGGCATCAAATTCAGTGACGGATCGGATATTACTGCGAGTGATTTTGTGGAT
ACCTGGAATTTTGTAGTGGAAAATGGACTGCTCAACACTTCTTTCTTCTCACCGATTAAAGGGTATGAG
GAGGGCGTGGAAACGCTCGAGGGTTTGAATGTGGTGGATGATCGCACATTTACCATCGAGCTTGCCCAA
CCGGATTCTGAGTTCACCCAACGCATTGGCTACTACGGTTTTGCACCGATGCCAGCTTCGGCTCGCGAT
GATATTGACGCCTTTGGTGAAAACCCCGTGTCCTCTGGCCCTTACAAACTAGAGCAGTGGGATCACAAC
GCAGAACTGAAAGTGGTGGCCAATGAACACTACGATGGCCCGCGCGCAGCCAACAACGATGGGTTGAAG
TACGTGTTCTACGCCGAAAATGATGCAGCTTATTCAGATCTGTTGGCTGGAAACCTAGATGTGCTGGAT
CTCATTCCACCATCGGCGTACACCACCTATGAAGAGGAACTGTCGGGTCGATCCATTAATCAACCTGCG
GCCTCCTATCTGGAACTCTCCATTCGCATGGAATCCGCCAACTTTGAAGGGCAACAGGGACAGTTGCGT
CGACAAGCAATTTCTATGGCGATTAACCGTGAAGAAATCGCTGAGCAGATCTTCGCCGGCACCTACACG
CCTGCGCTCGACTTCACCGCGCCCGTGCTCGACGGCTGGGGCGATGATTTGAACGGCAATGACGTGCTG
ACTTTCCAGCCTGACAAGGCCCGTGAGCTGTGGGAAGACGCTGAGGAGATCGCACCTTTTGAGGGCGAA
TTGCAGATCAGTTACAACGCGGATGTTCCCAACCGGGAATGGGTGGATGCGGTAGCAAACAGGATCAGC
AACGAATTAGACGTCAACGCCACTGGCAATCCTTTCCCCGATTTTAAATCCTTCCGCGACACATACCGC
ACCACCGGATTGGATGGGGGCTACCGCACCGCGTGGTTTGCGGACTACCCAAGCATCGGCAACTTCCTT
GGACCTAACTACACCTCGGGCGTGGCCTCCAACGATGCCAAGTACGAAAACCCAGAATTTGATCAATTG
ATTGCCGACGCCGCAGCAGCCTCCACCAAGGAGGAAACCTTCCAGGCATATGCGCAGGCCCAGGAAATG
TTGTTGCGCGATCTTCCCGCAATCCCACTGTGGTACCCGAATGTGGTTGGCGGCTACTCAGAATCCGTG
GACAACGTCTCCGTAAACTGGAAGGCCATACCTGTTTATTGGGCAATTACAAAGCAA
RXS01346-3′-Region
TAAAGTCATTAACCTAAATCCGG
RXS01425-5′-Region
AGTCCCTATTAATCCCAAGGAGTTTCGACTCACAGTGCTCAATTTCATTTATTGGCCAATTTGGGCCAT
TCTGTGGTTCTGGCATAAAGCGTTCAGCTTT
RXS01425-coding Region
GTGCTGAGCCCAGATTCCGGAATTACCTGGGCCTTGTCGATGATGTTCTTGACCTTCACCGTGGGTATG
GTTCTGGTCAAGCCGATGGTCAACACCATGCGTTCACAGCGCAAGATGCAAGACATGGCTCCAAAGATG
CAGGCCATCCGCGAGAAGTACAAAAATGACCAGCAGAAGATGATGGAGGAGACCCGCAAACTTCAAAAA
GAAGTGGGCGTTAACCCCATCGCAGGCTGTTTGCCAATGTTGGTGCAGATCCCAGTGTTCCTGGGTCTG
TTCCACGTGCTGCGCTCCTTCAACCGCACCGGTTCTGGCGTTGGCCAGCTGGAAATGACCGTTGAGCAA
AACGCGAACACCCCGAACTACATCTTCGGTGTCGACGAGGTTCAGTCCTTCCTGCGTGCAGACCTGTTC
GGTGCGCCACTGTCGTCCTACATCACCATGCCTGCTGACGCGTTCGACGCGTTCCTTGGCCTGGATGTC
TCCCGCCTCAACATCGCGCTGGTTGCAGCTCCAATGATTTTGATCATTGTCGTGGCAACTCACATGAAC
GCGCGTCTGTCCGTCAACCGCCAGGAAGCTCGCAAGGCAGCCGGCAAGCAGCAGGCCGCTTCCAGCGAT
CAGATGGCCATGCAGATGCAAATGATGAACAAGATGATGCTCTGGTTCATGCCAGCCACCATTTTGTTC
ACCGGCTTCATCTGGACCATCGGTCTTCTTGTCTACATGATGTCGAACAACGTGTGGAGCTTCTTCCAG
CAGCGCTACATCTTCGCCAAGATGGACGCTGAGGAAGCAGCTGAGGAGGAGGAAAAGCGCGCAGCAAAG
CGCACTACCGCTCCAAAGCCTGGCGTGAAGCCAGAAAACCCCAAGAAGCGTAAGAAG
RXS01425-3′-Region
TAAAACTTCACTAAAAAGCGCCA
RXS01658-coding Region
GATCCACAGATCCTGTCACCAACCTTCACCCAGCAACAGCAGCTGCGAAACTTCTACGGTTTCCCAGAC
CAGCTGGCGATGGACCGCTTTGAAGTAGATGGCAAACTCCGCGACTTTGTTGTGGCAGCACGTGAGCTC
GATCCAAACGCCCTGCAGCAAAACCAGCAGGACTGGATTAACCGTCAGACTGTTTATACCCACGGCAAC
GGCTTCATTGCAGCTCAAGCAAACCAGGTGGATGAGGTCGCCCGCGACGTCGGATCCACTCGTGGTGGT
TACCCTGTCTACACCGTCTCTGATTTGCAGTCGAATGCTGGTGCTGGAGAAAGCGAAGATGCTGAGGAG
CTTGGCATCAAGGTTGATGAGGCTCGTGTGTACTACGGACCACTGATTGCTTCTGCGACTGATGGTGCT
GACTACGCAATTGTCGGTGACACCGGCGATGGCCCAGTCGAGTAGGACACTGACACCTCCAGCTACACC
TACGAAGGTGCTGGCGGCGTGGACATTGGAAACATGGTGAACCGTGCGATGTTTGCATTGCGCTACCAG
GAAATGAACATGCTCCTGTCTGATCGTGTTGGTTCCGAATCCAAGATCCTATTTGAGCGCGATCCTCGT
TCCCGTGTGGAAAAGGTTGCACCTTGGTTGACCACTGACTCCAAGAGCTACCCAACTGTGATTGATGGT
CGCATCAAGTGGATCGTCGATGGCTACACCACCTTGGATAGTCTTCCGTACTCCACGCGCACCTGACTG
ACGGAAGCGACTCAGGATGCTGTCATGCCTGACGGCACCCGACAGCCACTGATCAGAGATAGGGTCGGT
TACATCCGCAACTCCGTGAAGGCTGTTGTTGATGCGTACGACGGAACTGTTGAACTCTACGAATTCGAC
ACCGAAGATCCTGTTCTGAAGGCATGGCGTGGCGTGTTCCCAGACACCGTGAAGGACGGGTCGGAGATT
TCCGATGAGCTTCGCGCACACCTGCGTTACCCAGAAGATTTGTTCAAGGTCCAGCGTGACATGCTGGCC
AAGTACAACGTTGATGATTCTGGAACATTCTTCACCAACGATGCGTTCTGGTCTGTCCCAGGTGACCCA
ACTGCAGGGGAGGGCCGCCAGGAACTTAAGCAGCCTCCTTACTACGTGGTGGCAGCAGACCCAGAGACC
GGTGAGTCCAGCTTCCAGCTGATCACCCCGTTCCGTGGACTTGAGGGCGAGTACCTCTCTGCACACATG
TCTGCGTCGTCTGATCCAGTTACCTACGGTGAAATCAGTGTTCGTGTGCTGCCTACGGATTCTGTGACC
CAGGGTCCAAAGGAGGCCCAGGATGCGATGATGTCATGTGACCAGGTTGCTCAGGACCAAACACTGTGG
CGTGGATCGAACGATCTGCACAACGGAAACCTGTTGACGTTGCCAGTTGGTGGCGGAGAGATCCTCTAC
GTTGAGCGGATTTACTCGCAGCGCAAGGATCAGGCATCGGCGTTGCCGAAGCTTCTGCGCGTGCTGGTC
TTCTACAAGGGTCAGGTTGGTTACGCACCAACGATCGCTGAAGCCCTATCGCAGGTCGGCATTGATCCG
AAGGAAGCGCAGGACATCGAAGAGGTAGATGGCACCGCTACGACGCCATCGACTGATGAGACTGACACT
GACACTGATCAGCCTGCAACCGAAACCCCAACTGCACCAGTGAGTGAGGCGGAAGGAATCGCGGCCATC
AACGATGCGTTGAGCAACCTTGAAGCTGCTCGCGATAGCTCTTTCGAAGAGTATGGTCGTGCACTCGAT
GCGCTTGATCGTGCCGTCGATAGCTACCAGTCCGCACAG
RXS01658-3′-Region
TAGCGTTTGAGTAAACAGCCCGA
RXS01677-5′-Region
GTCGGCATAGTTGAGTTTTATTCATGGCTTTTAGCTAGGCGACTTTAGTTGAGGGCTTTTAGTTGAGGG
CTTCCCAGCAGGGATGGTTAAGGAGAATTCA
RXS01G77-coding Region
GTGAACCAACAGAGTAAAAAGTGGCTCGTACCGACACTGGTCGTCATCATTGCAGTGCTCCTCATCGCA
GTTGTTCTGTTGATGTACCGAGGAAATGCGAGTGATACGGCCGAGGGCGTTTCAGCCGCTGCGACTTCG
GACTCGGCTGCTGCTTCGACTGCTGCTTGGGGTTCCGCTTCTGGTGGTGCGGACTCCGATCTGACCAGC
GTGGAAGCACGCGACCCTTCCGACCCTGTTGCGGTGGGAGACGTTGATGCACCTGTTGGGTTAGTGGTG
TTTTGCGACTAGCAATGCCCGTTCTGTGGAAAGTGGAGGGATGAAACGGTGCCACAGATGATGAAGCAT
GTGGAAGATGGAAACCTCCGCATTGAATGGCGTGAAGTGAACATCTTTGGAGAACCATCTGAGCGTGGA
GCTCGCGCGGCATACGCTGCGGGTTTGCAGGACGCATACTTGGAATACCACAACGCACTCTTTGCCAAC
GGTGAAAAACCCAGCGAAGACCTGCTCAGCGAAGAGGGACTTATTAAGCTTGCTGGTGACCTTGGACTA
GACGAATCGAAATTCACTGCCGATTTCCAATCCCCTGAAACTGCAGTCGCAATTGCGCAACATCAACAG
CTGGGAATCGATGTTGGCGCCTACTCCACCCCAGCTTTCCTCCTAGGTGGCCAGCCAATCATGGGCGCT
CAGCCTGCTTCTGTATTTGAAGCCGCCTTCGAGCAAGCACTGGCAGCGAAAGAA
RXS01677-3′-Region
TAAACCGTGGATGTCGGCCTAGT
RXS02586-5′-Region
TTCTCTGAGATCGTCATGATGAAGTACATCGGGTTCGGCATGATCGCAGCGCTGATTCTGGATGCCACC
ATCATCCGCATGCTGCTTGTCCCCCGCCGTG
RXS02586-coding Region
ATGCACCTGCTTCGCGACGACAACTGGTGGGCACCGGGCTTCGTTAAAAAGGCCTACACCGTCATGGGT
CACGGCTCTGAGGTGGAGGAAGCACCTCGCCCAACCAGCCGTCGCCTCAACGACGATGAGGAAGTCACC
GTGCATGAAGCAGTTGTCGCTGGCGATACCGTGGCATCTCGCGGTGGTTTGAGCACGCAGGAAAACCGT
GATCTGGTGTCCTTCGTGGAACTTAAGGCTCGTTTGGAAAAGCGCAGGCTTGAGGATCTAGAT
RXS02586-3′-Region
TAAATCTATGCGAGGATTTTTCA
RXS02587-5′-Region
AGCCTGGATAACCTGCGAGACGGTGGCGCATGGCTGCAGCCGTTCCGCCCTCTGACTGCCTTGTTATCC
AACCGCCACAATTCCCAGGAGTAATCCACCC
RXS02587-coding Region
GTGTTTTCTAAATGGGGCCACTTTGCTTACAGATTTAGGCGCATTGTTCCGTTAGTCGTCATCGCCGGG
ATTTTGGCTTTGTTTGTGATTTTCGGCACCAAGCTGGGCGACCGCATGAGCCAGGAAGGATGGGATGAT
CCTGGTTCTTCCTCGACCGCTGCGGCGCGCATCGAGTTGGAGACCTTTGGGCGTGACAATGAGGGCGAT
GTCGTGTTGCTGTTTAGTGCGCGTGAAGGCACTTCTTTCGATGATGCAGAGGTGTTCTCCAGCATCTCT
GGCTACTTAGATGGGCTAATCGAGAACAACCCTGATGAAGTCAGCCACATCAACAGCTACTTTGACACT
CGTAATGAAAATCTCCTCAGGAAAGACGGCACCCAAACCTTTGCAGCTCTCGGGCTGAAAGGTGACGGC
GAGCAAACGCTGAAGGACTTGCGGGAGATTGAAGATCAGCTCCATCCGGACAACCTTGCCGGTGGCGTC
ACCACTGAGGTCGCGGGTGCCACCGCTGTAGCCGACGCACTCGATGAGGGCATGGCTGGCGATATTTCA
CGCGCCGAAGTTTTTGCGCTGCCTTTCGTGGGTATGTTGCTGCTCATCGTGTTTGGCTCAGTTGTTGCC
GCGGCGATGCCATTGATCGTGGGCATTTTGTGCATCTTGGGTTCGCTGGGCATCTTGGCAATTTTGGCT
GGATTCTTCCAGGTCAAGGTATTTGCACAATGTGTTGTGACCCTTCTGGGCTTGGGTCTTGCCATTGAC
TATGGCTTATTCATGGTCTCTCGTTTCCGTGAGGAAATGGATAAGGGCACCCCGGTTGAACAGGCTGTT
GCGACGAGTACGGCGACCGCGGGTAAGACTGTGGTGTTGTCTGCAGCGATGGTGGCTGTGGCGCTGTCC
GGGTTGTTTGTTTTCCGACAGGCTTTCTTGAAGTCGGTGGCATTGGGTGCGATTTCGGCGGTTGGCCTT
GCTGCTTTGATGTCGGTGACGGTGTTGCCGTCGCTGTTCAGCATGTTGGGTAAGAATATCGATAAGTGG
AGTTTGCGTCGCACTGCTCGAACAGCGCGCCGTTTGGAAGACACCATTTGGTACCGCGTGCCGGCATGG
GCAATGCGCCATGCCAAGGCAGTGACCGTGGGCGTCGTATTGCTCTTGCTTGCTCTTACAGTGCGGTTG
ACGGGCGTGAAATTCGGCGGCATCAATGAAACGTATCTGCCACCAGCTAACGACACCCGCGTCGCCCAA
GAGCGTTTCGACGAGGCGTTTCCCGCCTTCCGCACCGAGCCGGTCAAGCTTGTGGTCACCGGGGCGGAC
AACAACCAGCTGATCGATATCTATGTTCAGGCCAACGAAGTTGAGGGACTGACAGATCGTTTCACCGCA
GGTGCGACTACCGATGATGGCACCACGGTGTTGTCTACTGGTATTCAGGATCGTTCCCTCAATGAGCAG
GTAGTGGAGCAGCTTCGCGCTATTTCCGTCCCTGAGGGCGTTGAGGTGCAGATCGGTGGCACTCCAGCC
ATGGAGATCGAATCCATTGAGGCGCTCTTTGAAAAGCTCCTCTGGATGGCTCTCTACATTGTGCTGGCC
ACTTTCATCCTCATGGCATTGGTATTTGGTTCGGTGATTTTGCCGGCGAAGGGCATCATCATGACCATT
CTGGGTATGGGTGCCACCTTGGGTATTCTCACCTTGATGTTCGTGGATGGCGTGGGTGCCAGCGCATTG
AACTTCTCCCCTGGCCCACTGATGAGTCCAGTGCTGGTGCTGATCATGGCTATTATTTACGGACTTTCC
ACCGACTATGAGGTGTTCCTGGTATCTCGCATGGTGGAGGCCCGCGATAAAGGCGAATCCACCGACGAC
GCCATCAGATACGGCACTGCACACACCGGATCTATGATCACCGCGGCCGCACTGATCATGATTGTGGTC
TGTGGAGCGTTTGGTTTCTCTGAGATCGTCATGATGAAGTACATCGCGTTCGGCATGATCGCAGCGCTG
ATTCTGGATGCGACCATCATCCGCATGCTGCTTGTCCCCCGCCGTGATGCACCTGCTTCGCGACGACAA
CTGGTGGGCACCCGGCTTCGT
RXS02587-3′-Region
TAAAAAGGCGTACACCGTCATGG
RXS02590-5′-Region
GCCCCAAAGGCTTAAAGTAATGGGCATGCCCACTGCTTCTTCGACCAAAAGCTACGCTGCGGTCTTACC
TCCACCTGGCCCCTCGTGGGCTGGTTCCCTC
RXS02590-coding Region
ATGGGCATCTCATTGTTGTCATCACTGTTGAAAATCCATGGTTTTCCAGTCGTCGCAGATTTCTTCTTC
GCGTTAGCTGTTGTGGTGGCAATTGTCATTATTGGCGGTTGGCTAATCTACCGCTCTCCTTCATTCAAA
ACTGAAGTCATGCCGGCATGGGCAATGCTGTCCATGGGTTTGATCGCATTGGGAACTGCAAGCCCCGTA
GTTTTGGGTGATGATCTGTGGGGATTTATGTTTGTGTGCTGGTCTATTGGCACAGCCGTGGGACTTGTT
GCCTATTCCTTATATATAACGGCCATTTTGCGATCTAAGGCGGGCAGACCAACTTTTGCGTGGGGTCTT
CCTCTTGTCACGCCGATGGTTGCTTCCACCTCGGCAGCACAACTCCATGAGCACTTTGAACTTCCGGCG
ATGCTGTGGGTTTGTTTCGGGCTCTTCCTTTTAACTTTGGCGTCTGCACCAGGAGTTTTTACCCGAGTG
TATTTCTACTATTTCGGCCCCAAGGCGCAGGGCATCCCACTGATGGCAACACCAACATCATGGATTCCT
TTGGGTATGGTGGGCCAATCCACTGCAGCAGCTCAGCTCATCGGTGCGTCCTTTGGATCCAAGACAGCA
ATCACAATGGGCATTATTTACGGCATCATCATGGGAATTTTTACGATTCCTCTGGGAGCCATCGCTCAC
TTTGTGTTCTACAGAGCTGTTTTCAAAGGGGCGACATACAGCCCCACATGGTGGGCCAGTACCTTCCCA
GTTGGCACTTTGAGTTTGGGTGGGCATTTTTTATCACAGAGCACCGGAGTGGAGTGGTTTAACTACTTC
AGCCTGTACTTGATTGCTTTAATGCTCTTTCATGTCATCGTGTCCACCATCGCCGGTACGATTGCAGTA
ATGAGAAGAATCGTCGGAAAGCTTAAATCTCAACTGGCC
RXS02590-3′-Region
TAAATTGCAGGGAGAGGTCTAAA
RXS02932-5′-Region
CACTACTGCGTTAAGGTATGAAAGTTCGCACACCAGCGATTTAATTGTGTGGCCACGACTAGCACGACC
ATTTCAGTTTTAACTTTCTTGGAGTTTTCTA
RXS02932-coding Region
GTGTCCAAAACAGAAGAAGGCCGTTCAGCGGGCATAATTATTTACGCGTTTCCAACTTTCATTCTGGTG
GGCGCGATCATTGCGTTTATCTTCCCGGAACCATTGATTCCGCTGACAAACTACATTAATATCTTCCTC
ACGATCATCATGTTCACCATGGGTTTGAGCTTGACGGTGCCCGATTTTCAGATGGTGGTTAAACGTCCA
CTGCCTATCTTGATCGGTGTAGTAGCGCAGTTTGTCATCATGCCATTCCTGGCGATCGTGGTTGCGAAA
ATGTTCAACCTCAACCCAGCACTGGCCGTTGGCCTTCTCATGCTGGGATCCGTTCCGGGTGGCACCTCC
TCCAATGTGATTGCGTTTCTCGCCCGAGGAGATGTCGCGCTATCGGTCACCATGACCTCTGTGTCCACC
ATTGTTTCCCCAATCATGACGCCTTTCCTGATGCTCATGCTGGCAGGTAGTGAAACCGCGGTCGATGGT
GGAGGCATGGCGTGGAGTTTGGTACAAACAGTGCTGGTGCCTGTGATCATCGGCCTAGTTCTGCGTGTC
TTCTTGAACAAGTGGATCGACAAGATTTTGCCGATCGTTCGTTATCTCTCCATCCTCGGTATCGGTGGC
GTGGTGTTCGGCGCAGTCGCAGCCAACGCGGAACGACTCGTGTCTGTCGGAGTCATCGTGTTCGTTGCA
GTTATCGTGCACAACGTACTTGGATACGTTGTGGGATACCTCACCGGCCGTGTATTCAAATTCCCAGAA
GGAGCAAACCGCACCATGGCGATTGAAATCGGAACCCAATCCGCAGGCCTGGCATCGGGAATGGCAGGA
CGATTCTTCACCCCAGAAGCAGCCCTTCCAGGTGCTGTCGCTGCCTTGGTCCACAACATCACCGGCGCA
GTTTATGTTGGGCTGGTACGAAACAGGCCTTTGACTAAGGCATCAAGGAAGAAGGAATCCGTCGCGGTT
TCCAGC
RXS02932-3′-Region
TAACTTATTTGCTGGCCGTTAGA
RXS03042-5′-Region
ATGACACCGGCGCGACGTATGGCATTACTGGCGTACCCCAATTTACGATGACATCTCTGCTCGCCTCGG
CGACGTCCTGGTTCCTTACGTTCTGATCGTT
RXS03042-coding Region
TTGGTTCTAGCGTTCCTCGTGCTGTTGCTCGTGTTCCGGTCCATTTGGGTCCCATTGATCGCGGCTCTG
GGCTTTGGCTTGTCAGTTCTGGCTACCTTTGGTGCTACGGTGGCGATCTTCCAAGAAGGTGCTTTCGGC
ATCATCGACGATCCTCAGGCACTGCTGTCCTTCTTGCCGATCATGCTCATCGGCGTGGTATTTGGTCTG
GCCATGGATTACCAGATCTTCCTCGTTACTCGTATGCGTGAGGGCTTGAGCAAGGGCAAGAGTGCGGGC
AACGCAACGTCGAATGGTTTCAAGCACGGTGCGCGCGTGGTCACTGCTGCGGGGCTGATCATGGTGTCT
GTGTTCGCGGCATTCATAGCGCAGGACATGGCGTTTATTAAGACCATGGGCTTTGCTCTGGGCGTTGCT
GTGTTCTTCGATGCCTTCGTTGTTCGCATGATGATTATCCCTGCAACAATGTTCCTGCTTGATGACAAG
GCTTGGTGGCTACCTAAGTGGTTGGATAAGATTCTTCCCAACGTTGATGTTGAAGGTGAGGGTCTTAGT
GAACTACATGAGGCTCGCACCGAGGAACTGAAGGAAAATGTAGGTGTCGGGGCT
RXS03042-3′-Region
TAGAGAAACAAAAAAGGCTGCTA
RXS03075-5′-Region
TGTGCAAAATTGCATTCAGGCTGAAAAATTCCTAAAGGGACTCCGTCCGAATAATTGGAAAGCCCAGAA
GAACAGTCAACTCCTAGATTAAAGGATAATC
RXS03075-coding Region
GTGGCGAAATTCCTGTATAAGTTAGGCTCCACGGCCTATCAAAAGAAATGGCCGTTTCTTGCGGTCTGG
CTCGTGATTCTCATAGGTATCACGACGCTGGCGGGGCTGTATGCCAAGCCAACGTCGAGTAGCTTCTCT
ATCCCTGGTCTTGATTCTGTCACGACCATGGAGAAGATGCAGGAGCGTTTCCCTGGTTCGGATGATGCA
ACATCGGCTCCCACTGGTTCTGTCGTCATTCAGGCACCGGAAGGCAAGACCCTCACTGATCCTGAGGTT
GGGGCTGAAGTAAACCAGATGCTTGATGAGGTTCGGGCGACTGGTGTGCTGAAGGATGCTGATTCCGTT
GTGGATCCTGTGTTGGCTGCGCAGGGTGTGGCTGCTCAGATGACCCCAGCCCTGGAGGCTGAGGGTGTA
CCTGCGGAGAAGATCGCCGCAGATATTGAGTCGATTAGTCCACTGAGTGCAGATGAGACTACCGGCATC
ATCTCGATGACTTTTGATGCAGATTCTGCCATGGATATATCCGCAGAGGATCGTGAGAAGGTCACCAAT
ATTCTTGATGAATACGATGACGGCGATCTGACTGTTGTCTACAACGGCAACGTGTTTGGCGCAGCTGCA
ACCAGCTTGGACATGACCTCTGAGCTCATCGGCCTGCTGGTGGCTGCGGTCGTTCTTATCGTGACCTTC
GGTTCGTTCATCGCTGCCGGTATGCCGCTGATCTCT
RXS03124-coding Region
ATGACTGCTACCCTGGCGTCGATGATTGGTCTGGCTGTGGGTATCGACTACGCGCTATTTATCGTGTCC
CGTTTCGGCAATGAGTTGATTTGTCAGACTGGCGCTAATGATCTGGAGCCAAAGGAATTGGCTGAGCGT
CTGCGCACCATGCCGTTGGCTGCTGGTGCGCATGCGATGGGAATGGCTGTGGGCACTGCGGGTTCTGCG
GTTGTATTCGCGGGTACCACGGTGCTGATCGCTCTGGTTGCTCTGTCGATCATTAATATTCCATTTCTA
ACCGTGATGGCCATTGCTGCCGCAATCACCGTTGCCATCGCAGTTCTGGTTGCTCTGTCCTTCCTCCCA
GCTGTGCTTGGCCTGGTTGGCACTGGCATCTTCGCAGCACGCGTGCCTGGACCTAAGGTTCCGGATCCT
GAGGACGAGAAGCCAACGATGGGTCTGAAGTGGGTCCGCCTTGTGCGCAAGATGCCGGTGGCTTACCTG
CTGGTTGGCGTCGTTTTGCTTGGTGCAATCGCAATTCCTGCGACCAATATGCGCCTGGCCATGCCGACT
GATGGCACCTCCACGCTGGGCACCGGGCCGCGCACGGGGTATGACATGACGGCAGATGCGTTCGGCCCG
GGCCGCAACGCGCCCATGATTGCGCTTATCGACGCAACCGACGTGCCTGAGGAAGAACGCCCATTGGTG
TTTGGACAGGCGGTGGAGCAATTCTTGAACACTGATGGTGTGAAGAATGCTCAGATCACTCAGACCACG
GAGAATTTCGATACCGCGCAGATCGTGTTAGCGCAGAATTTGATGCGATCGATGAGCGCACCTCTGAGA
CTCTCGCAACTCTTCGTGCAGATGCTGAGACCTTCGCTGATGACACCGGCGCGACGTATGGCATTACTG
GCGTCACCCCAATTTACGATGACATCTCTGCTCGCCTCGGCGACGTCCTGGTTCCTTACGTTC
RXS03124-3′-Region
TGATCGTTTTGGTTCTAGCGTTG
RXS03125-5′-Region
TGACACCGGCGCGACGTATGGCATTACTGGCGTCACCCCAATTTACGATGACATCTCTGCTCGCCTCGG
CGACGTCCTGGTTCCTTACGTTCTGATCGTT
RXS03125-coding Region
TTGGTTCTAGCGTTCCTCGTGCTGTTGCTCGTGTTCCGGTCCATTTGGGTCCCATTGATCGCGGCTCTG
GGCTTTGGCTTGTCAGTTCTGGCTACCTTTGGTGCTACCGTGGCGATCTTCCAAGAAGGTGCTTTCGGC
ATCATCGACGATCCTCAGCCACTGCTGTGCTTC
RXS03220-coding Region
ATGGGCTTAAGGGAAATTTTGTCCAGCAAGTGGCTTGTGCGCATCCTCCTGGTAGGTATCGGATTGGGT
GTCGCACAGCAGCTGACCGGCATCAACTCCATCATGTACTACGGCCAGGTTGTTCTCATTGAGGCTGGT
TTCTCCGAGAATGCAGCTCTGATCGCCAACGTGGCGCCAGGAGTGATCGCAGTTGTCGGTGCATTCATC
GCACTGTGGATGATGGATGGTATCAACCGCCGTACCACCGTCATTAGCGGTTATTCTCTCACCACCATT
AGCCACGTATTGATCGGTATCGCATGCGTAGCATTCCCAGTGGGCGATCCTCTTCGCCCCTACGTTATC
TTGACTCTGGTTGTGGTCTTGGTGGGATCGATGCAGAGCTTCCTCAACGTAGCTACCTGGGTTATGCTG
TCTGAGCTCTTCCCGCTGGCAATGCGCGGTTTGGCAATCGGTATCTCAGTGTTCTTCCTCTGGATCGCA
AACGCGTTCCTCGGATTGTTCTTGCCAACCATCATGGAAGCAGTAGGACTAACCGGAACCTTCTTCATG
TTCGCCGGAATCGGTGTGGTTGCCTTGATCTTCATCTAGACCCAGGTTCCTGAAACTCGTGGACGTACC
TTGGAGGAGATTGATGAGGATGTTACTTCCGGTGTCATTTTCAACAAGGACATCCGAAAAGGAAAGGTG
CAC
RXS03220-3′-Region
TAAAAACCCAGACACTGCATAGATAACACG
RXS03221-5′-Region
CAAAAGTATTCAAAAAAAGTTTGTTATGTACCATTGACGGGACATATCGTGTCTGCCACGATTAAAGAC
ATTGGTGATGTGAATCACTGCCTACTACATC
RXS03221-coding Region
GTGTTTCGTGACCCTGCACCTCCAAGTAAGGGCACGACAAACTTAGGAGACAAGATGGCTAGTACCTTC
ATTCAGGCCGACAGCCCTGAAAAAAGTAAGAAGCTGCCCCCACTCACAGAAGGTCCGTATAGAAAGCGG
CTATTCTACGTTGCACTAGTTGCGACGTTTGGTGGGCTGCTCTTCGGATATGACACCGGAGTAATCAAC
GGTGCACTCAACCCAATGACACGTGAGCTCGGACTAACCGCGTTCACCGAGGGTGTTGTAACTTCTTCC
CTGCTGTTTGGTGCAGCAGCTGGTGCGATGTTTTTCGGTCGCATTTCCGACAACTGGGGTCGCCGGAAA
ACAATCATCTCACTTGCAGTAGCTTTCTTTGTCGGCACCATGATCTGCGTGTTTGCTCCATCTTTTGCA
GTAATGGTTGTCGGACGTGTGCTTCTTGGACTCGCAGTTGGTGGCGCTTCCACTGTTGTCCCTGTCTAC
CTGGCTGAACTTGCTCCTTTTGAAATCCGTGGCTCACTGGCTGGCCGTAATGAGTTGATGATTGTTGTT
GGTCAGCTCGCAGCTTTTGTCATCAATGCGATTATTGGAAATGTTTTTGGACACCACGATGGTGTGTGG
CGCTACATGCTGGCAATTGCCGCAATCCCAGCAATTGCCCTCTTCTTTGGAATG

[0171] TABLE 4
ALIGNMENT RESULTS

| | length | | | | | | % homology | Date of |
|---|---|---|---|---|---|---|---|---|
| ID # | (NT) | Genbank Hit | Length | Accession | Name of Genbank Hit | Source of Genbank Hit | (GAP) | Deposit |
| rxa00001 | 1251 | GB_BA1:SRMSIK | 2384 | Y08921 | S. reticuli gene encoding Msik protein and orf1. | Streptomyces reticuli | 63,746 | 21-MAR-1997 |
| | | GB_BA1:SLU12007 | 1602 | U12007 | Streptomyces lividans 1326 ATP binding protein MsiK (msiK) gene, | Streptomyces lividans | 62,951 | 30-MAR-1996 |
| | | | | | complete cds. | | | |
| | | GB_BA1:MTCY16B7 | 43430 | Z81331 | Mycobacterium tuberculosis H37Rv complete genome; segment 123/162. | Mycobacterium | 41,425 | 17-Jun-98 |
| | | | | | | tuberculosis | | |
| rxa00002 | 807 | GB_BA1:MTV018 | 53450 | AL021899 | Mycobacterium tuberculosis H37Rv complete genome; segment 90/162. | Mycobacterium | 37,913 | 18-Jun-98 |
| | | | | | | tuberculosis | | |
| | | GB_EST22:AU020788 | 558 | AU020788 | AU020788 Mouse eight-cell stage embryo cDNA Mus musculus cDNA | Mus musculus | 38,757 | 19-OCT-1998 |
| | | | | | clone J0538B03 3′, mRNA sequence. | | | |
| | | GB_PR3:AC004160 | 143751 | AC004160 | Homo sapiens BAC clone GS164B05 from 7p21-p22, complete sequence. | Homo sapiens | 35,687 | 20-Feb-98 |
| rxa00089 | 1122 | GB_EST27:AI461009 | 570 | AI461009 | sa77g07.y1 Gm-c1004 Glycine max cDNA clone GENOME SYSTEMS | Glycine max | 37,833 | 01-DEC-1999 |
| | | | | | CLONE ID: Gm-c1004-5365 5′ similar to TR: O04014 O04014 RIBOSOMAL | | | |
| | | | | | PROTEIN S6 RPS6-1.;, mRNA sequence. | | | |
| | | GB_EST32:AI736780 | 474 | AI736780 | sb33d08.y1 Gm-c1012 Glycine max cDNA clone GENOME SYSTEMS | Glycine max | 37,367 | 06-DEC-1999 |
| | | | | | CLONE ID: Gm-c1012-232 5′ similar to TR: O04014 O04014 RIBOSOMAL | | | |
| | | | | | PROTEIN S6 RPS6-1.;, mRNA sequence. | | | |
| | | GB_EST30:AI637616 | 280 | AI637616 | tt10c03.x1 NCI_CGAP_GC6 Homo sapiens cDNA clone IMAGE: 2240356 | Homo sapiens | 37,455 | 27-Apr-99 |
| | | | | | 3′, mRNA sequence. | | | |
| rxa00090 | 1242 | GB_PL1:SCYOR023C | 1989 | Z74931 | S. cerevisiae chromosome XV reading frame ORF YOR023c. | Saccharomyces | 36,078 | 11-Aug-97 |
| | | | | | | cerevisiae | | |
| | | GB_GSS15:AQ659370 | 487 | AQ659370 | Sheared DNA-5C3.TR Sheared DNA Trypanosoma brucei genomic clone | Trypanosoma brucei | 44,920 | 23-Jun-99 |
| | | | | | Sheared DNA-5C3, genomic survey sequence. | | | |
| | | GB_PL1:MZEHSZEIN | 2123 | L29505 | Zea mays high sulfur zein gene, complete cds. | Zea mays | 37,245 | 24-MAR-1994 |
| rxa00099 | 1296 | GB_HTG1:HSDA14C6 | 155908 | AL049732 | Homo sapiens chromosome X clone RP6-14C6, *** SEQUENCING IN | Homo sapiens | 35,984 | 23-Nov-99 |
| | | | | | PROGRESS ***, in unordered pieces. | | | |
| | | GB_HTG1:HSDA14C6 | 155908 | AL049732 | Homo sapiens chromosome X clone RP6-14C6, *** SEQUENCING IN | Homo sapiens | 35,984 | 23-Nov-99 |
| | | | | | PROGRESS ***, in unordered pieces. | | | |
| | | GB_PL2:ATF22I13 | 93760 | AL035539 | Arabidopsis thaliana DNA chromosome 4, BAC clone F22I13 (ESSA | Arabidopsis thaliana | 35,161 | 27-Aug-99 |
| | | | | | project). | | | |
| rxa00123 | 1242 | GB_PL1:OS4CL | 5225 | X52623 | Rice 4-CL gene for 4-coumarate-CoA ligase (EC 6.2.1.12). | Oryza sativa | 39,330 | 7-Apr-93 |
| | | GB_BA1:AB020531 | 6445 | AB020531 | Escherichia coli plasmid pTZ3721 gene cluster containing the mphB gene | Escherichia coli | 36,923 | 20-Feb-99 |
| | | | | | for macrolide 2′-phosphotransferase II, complete cds. | | | |
| | | GB_PL1:OS4CL | 5225 | X52623 | Rice 4-CL gene for 4-coumarate-CoA ligase (EC 6.2.1.12). | Oryza sativa | 39,118 | 7-Apr-93 |
| rxa00160 | 696 | GB_EST11:AA270696 | 178 | AA270696 | va46g09.r1 Soares mouse 3NME12 5 Mus musculus cDNA clone | Mus musculus | 46,067 | 26-MAR-1997 |
| | | | | | IMAGE: 734464 5′ similar to gb: M17886 60S ACIDIC RIBOSOMAL | | | |
| | | | | | PROTEIN P1 (HUMAN); gb: U29402 Mus musculus acidic ribosomal | | | |
| | | | | | phosphoprotein P1 mRNA, complete (MOUSE);, mRNA sequence. | | | |
| | | GB_HTG3:AC010829 | 149101 | AC010829 | Homo sapiens clone 6_J_21, LOW-PASS SEQUENCE SAMPLING. | Homo sapiens | 36,880 | 23-Sep-99 |
| | | GB_HTG3:AC010829 | 149101 | AC010829 | Homo sapiens clone 6_J_21, LOW-PASS SEQUENCE SAMPLING. | Homo sapiens | 36,880 | 23-Sep-99 |
| rxa00193 | 594 | GB_PR3:AC005826 | 177585 | AC005826 | Homo sapiens clone UWGC: rg041a03 from 7p14-15, complete sequence. | Homo sapiens | 37,012 | 16-OCT-1998 |
| | | GB_HTG2:AC007076 | 95477 | AC007076 | Homo sapiens clone DJ0698F07, *** SEQUENCING IN PROGRESS ***, 1 | Homo sapiens | 37,012 | 5-Jun-99 |
| | | | | | unordered pieces. | | | |
| | | GB_HTG2:AC007076 | 95477 | AC007076 | Homo sapiens clone DJ0698F07, *** SEQUENCING IN PROGRESS ***, 1 | Homo sapiens | 37,012 | 5-Jun-99 |
| | | | | | unordered pieces. | | | |
| rxa00203 | 1035 | GB_GSS3:B88972 | 699 | B88972 | CIT-HSP-2173C11.TR CIT-HSP Homo sapiens genomic clone 2173C11, | Homo sapiens | 41,411 | 25-Jun-98 |
| | | | | | genomic survey sequence. | | | |
| | | GB_GSS11:AQ290299 | 642 | AQ290299 | nbxb0036N17r CUGI Rice BAC Library Oryza sativa genomic clone | Oryza sativa | 38,245 | 03-DEC-1998 |
| | | | | | nbxb0036N17r, genomic survey sequence. | | | |
| | | GB_EST20:AA843374 | 479 | AA843374 | aj16e10.s1 Soares_parathyroid_tumor_NbHPA Homo sapiens cDNA clone | Homo sapiens | 34,874 | 31-DEC-1998 |
| | | | | | IMAGE: 1390506 3′, mRNA sequence. | | | |
| rxa00204 | 1695 | GB_BA1:SC3F9 | 19830 | AL023862 | Streptomyces coelicolor cosmid 3F9. | Streptomyces coelicolor | 49,556 | 10-Feb-99 |
| | | GB_BA2:AF160811 | 10671 | AF160811 | Bacillus stearothermophilus L-arabinose transport, ATP binding protein | Bacillus | 51,004 | 28-Jul-99 |
| | | | | | (araG), L-arabinose membrane permease (araH), AraR (araR), L-ribulose 5- | stearothermophilus | | |
| | | | | | phosphate 4-epimerase (araD), L-ribulokinase (araB), L-arabinose | | | |
| | | | | | isomerase (araA), and IS5377 transposase genes, complete cds. | | | |
| | | GB_BA2:MPAE000056 | 16213 | AE000056 | Mycoplasma pneumoniae section 56 of 63 of the complete genome. | Mycoplasma | 34,895 | 18-Nov-96 |
| | | | | | | pneumoniae | | |
| rxa00270 | 1011 | GB_BA1:MLCB1770 | 37821 | Z70722 | Mycobacterium leprae cosmid B1770. | Mycobacterium leprae | 37,089 | 29-Aug-97 |
| | | GB_GSS4:AQ681972 | 452 | AQ681972 | HS_5503_B2_C02_T7A RPCI-11 Human Male BAC Library Homo sapiens | Homo sapiens | 40,099 | 28-Jun-99 |
| | | | | | genomic clone Plate = 1079 Col = 4 Row = F, genomic survey sequence. | | | |
| | | GB_VI:IVU47137 | 986 | U47137 | Inkoo virus Prototype KN3641 nucleocapsid protein and non-structural | Inkoo virus | 37,061 | 22-Aug-96 |
| | | | | | protein genes, complete cds. | | | |
| rxa00311 | 978 | GB_VI:VMVY16780 | 186986 | Y16780 | variola minor virus complete genome. | variola minor virus | 37,722 | 2-Sep-99 |
| | | GB_VI:VARCG | 186103 | L22579 | Variola major virus (strain Bangladesh-1975) complete genome. | Variola major virus | 38,558 | 12-Jan-95 |
| | | GB_VI:VVCGAA | 185578 | X69198 | Variola virus DNA complete genome. | Variola virus | 39,518 | 13-DEC-1996 |
| rxa00312 | 549 | GB_HTG4:AC011190 | 164409 | AC011190 | Homo sapiens clone hRPK.24_A_1, *** SEQUENCING IN PROGRESS | Homo sapiens | 34,741 | 19-OCT-1999 |
| | | | | | ***, 31 unordered pieces. | | | |
| | | GB_HTG4:AC011190 | 164409 | AC011190 | Homo sapiens clone hRPK.24_A_1, *** SEQUENCING IN PROGRESS | Homo sapiens | 34,741 | 19-OCT-1999 |
| | | | | | ***, 31 unordered pieces. | | | |
| | | GB_HTG4:AC011190 | 164409 | AC011190 | Homo sapiens clone hRPK.24_A_1, *** SEQUENCING IN PROGRESS | Homo sapiens | 34,807 | 19-OCT-1999 |
| | | | | | ***, 31 unordered pieces. | | | |
| rxa00345 | 1074 | GB_HTG2:AC007356 | 185382 | AC007356 | Drosophila melanogaster chromosome 2 clone BACR24H09 (D595) RPCI- | Drosophila | 36,364 | 2-Aug-99 |
| | | | | | 98 24.H.9 map 49A-49B strain y; cn bw sp, *** SEQUENCING IN | melanogaster | | |
| | | | | | PROGRESS ***, 13 unordered pieces. | | | |
| | | GB_HTG2:AC007356 | 185382 | AC0007356 | Drosophila melanogaster chromosome 2 clone BACR24H09 (D595) RPCI- | Drosophila | 36,364 | 2-Aug-99 |
| | | | | | 98 24.H.9 map 49A-49B strain y; cn bw sp, *** SEQUENCING IN | melanogaster | | |
| | | | | | PROGRESS ***, 13 unordered pieces. | | | |
| | | GB_HTG2:AC005814 | 183922 | AC005814 | Drosophila melanogaster chromosome 3 clone BACR48M07 (D471) RPCI- | Drosophila | 38,031 | 30-Jul-99 |
| | | | | | 98 48.M.7 map 64A6-64B6 strain y; cn bw sp, *** SEQUENCING IN | melanogaster | | |
| | | | | | PROGRESS ***, 11 unordered pieces. | | | |
| rxa00378 | 2733 | GB_BA2:ALW243431 | 26953 | AJ243431 | Acinetobacter Iwoffii wzc, wzb, wza, weeA, weeB, wceC, wzx, wzy, weeD, | Acinetobacter Iwoffii | 36,717 | 01-OCT-1999 |
| | | | | | weeE, weeF, weeG, weeH, weeI, weeJ, weeK, galU, ugd, pgi, galE, pgm | | | |
| | | | | | (partial) and mip (partial) genes (emulsan biosynthetic gene cluster), strain | | | |
| | | | | | RAG-1. | | | |
| | | GB_BA2:ALW243431 | 26953 | AJ243431 | Acinetobacter Iwoffii wzc, wzb, wza, weeA, weeB, wceC, wzx, wzy, weeD, | Acinetobacter Iwoffii | 36,394 | 01-OCT-1999 |
| | | | | | weeE, weeF, weeG, weeH, weeI, weeJ, weeK, galU, ugd, pgi, galE, pgm | | | |
| | | | | | (partial) and mip (partial) genes (emulsan biosynthetic gene cluster), strain | | | |
| | | | | | RAG-1. | | | |
| | | GB_RO:MMCOL3A1 | 43601 | X52046 | M. musculus COL3A1 gene for collagen alpha-I. | Mus musculus | 35,159 | 8-Nov-94 |
| rxa00412 | 1203 | GB_BA1:ECU70214 | 123171 | U70214 | Escherichia coli chromosome minutes 4-6. | Escherichia coli | 39,914 | 21-Sep-96 |
| | | GB_BA1:ECOTSF | 91430 | D83536 | Escherichia coli genomic DNA. (4.1-6.1 min). | Escherichia coli | 39,828 | 28-MAY-1999 |
| | | GB_HTG3:AC011366 | 177590 | AC011366 | Homo sapiens chromosome 5 clone CIT-HSPC_568L21, *** | Homo sapiens | 46,212 | 06-OCT-1999 |
| | | | | | SEQUENCING IN PROGRESS ***, 82 unordered pieces. | | | |
| rxa00413 | 1020 | GB_PR3:AC005209 | 184130 | AC005209 | Homo sapiens chromosome 17, clone hRPK.628_O_18, complete | Homo sapiens | 34,028 | 24-Jul-98 |
| | | | | | sequence. | | | |
| | | GB_PR3:HUMIL8R | 13089 | M99412 | Human interleukin-8 receptor (IL8RB) gene, complete cds. | Homo sapiens | 37,934 | 22-Apr-98 |
| | | GB_PR4:AC006974 | 90241 | AC006974 | Homo sapiens PAC clone DJ0958B11 from 7q33-q36, complete sequence. | Homo sapiens | 37,948 | 29-Jul-99 |
| rxa00431 | 912 | GB_BA1:MSGY126 | 37164 | AD000012 | Mycobacterium tuberculosis sequence from clone y126. | Mycobacterium | 66,776 | 10-DEC-1996 |
| | | | | | | tuberculosis | | |
| | | GB_BA1:MTY13D12 | 37085 | Z80343 | Mycobacterium tuberculosis H37Rv complete genome; segment 156/162. | Mycobacterium | 66,776 | 17-Jun-98 |
| | | | | | | tuberculosis | | |
| | | GB_BA1:MSGB971CS | 37566 | L78821 | Mycobacterium leprae cosmid B971 DNA sequence. | Mycobacterium leprae | 39,429 | 15-Jun-96 |
| rxa00444 | 960 | GB_PR4:AC007564 | 194058 | AC007564 | Homo sapiens 12q22 BAC RPCI11-513P18 (Roswell Park Cancer Institute | Homo sapiens | 35,220 | 3-Jul-99 |
| | | | | | Human BAC Library) complete sequence. | | | |
| | | GB_HTG4:AC007553 | 271496 | AC007553 | Homo sapiens chromosome 12q22-102.7-103.4 clone RPCI11-557K11, *** | Homo sapiens | 35,408 | 21-OCT-1999 |
| | | | | | SEQUENCING IN PROGRESS ***, 70 unordered pieces. | | | |
| | | GB_HTG4:AC007553 | 271496 | AC007553 | Homo sapiens chromosome 12q22-102.7-103.4 clone RPCI11-557K11, *** | Homo sapiens | 35,408 | 21-OCT-1999 |
| | | | | | SEQUENCING IN PROGRESS ***, 70 unordered pieces. | | | |
| rxa00445 | 1035 | GB_HTG3:AC011455_0 | 244238 | AC011455 | Homo sapiens chromosome 19 clone CIT-HSPC_360G5, *** | Homo sapiens | 35,455 | 19-Dec-99 |
| | | | | | SEQUENCING IN PROGRESS ***, 287 unordered pieces. | | | |
| | | GB_HTG3:AC011455_0 | 244238 | AC011455 | Homo sapiens chromosome 19 clone CIT-HSPC_360G5, *** | Homo sapiens | 35,455 | 19-Dec-99 |
| | | | | | SEQUENCING IN PROGRESS ***, 287 unordered pieces. | | | |
| | | GB_HTG3:AC011455_0 | 244238 | AC011455 | Homo sapiens chromosome 19 clone CIT-HSPC_360G5, *** | Homo sapiens | 41,511 | 19-Dec-99 |
| | | | | | SEQUENCING IN PROGRESS ***, 287 unordered pieces. | | | |
| rxa00466 | | | | | | | | |
| rxa00482 | 771 | GB_PR4:AF119709 | 43566 | AF119709 | Homo sapiens chromosome 8q24 BAC clone H103, complete sequence. | Homo sapiens | 36,724 | 28-Feb-99 |
| | | GB_RO:AC005960 | 158414 | AC005960 | Mus musculus chromosome 17 BAC citb20h22 from the MHC region, | Mus musculus | 39,836 | 01-DEC-1998 |
| | | | | | complete sequence. | | | |
| | | GB_RO:MUSMHH2M4X | 3994 | L14278 | Mouse MHC class I H2-M4 gene, exons 1-5. | Mus musculus | 32,713 | 11-Aug-93 |
| rxa00523 | 1149 | GB_BA2:AF176902 | 3032 | AF176902 | Corynebacterium diphtheriae IRP1B (irp1B), IRP1C (irp1C), and IRP1D | Corynebacterium | 58,781 | 5-Sep-99 |
| | | | | | (irp1D) genes, complete cds. | diphtheriae | | |
| | | GB_HTG3:AC002489 | 91638 | AC002489 | Mus musculus chromosome X clone 592 map X, *** SEQUENCING IN | Mus musculus | 37,819 | 3-Aug-99 |
| | | | | | PROGRESS ***, 8 unordered pieces. | | | |
| | | GB_HTG3:AC002489 | 91638 | AC002489 | Mus musculus chromosome X clone 592 map X, *** SEQUENCING IN | Mus musculus | 37,819 | 3-Aug-99 |
| | | | | | PROGRESS ***, 8 unordered pieces. | | | |
| rxa00525 | 1386 | GB_BA1:D90917 | 154619 | D90917 | Synechocystis sp. PCC6803 complete genome, 27/27, 3418852-3573470. | Synechocystis sp. | 46,966 | 7-Feb-99 |
| | | GB_PL1:AOF132610 | 477 | AJ132610 | Asparagus officinalis mRNA for intracellular pathogenesis-related protein, | Asparagus officinalis | 38,819 | 1-Feb-99 |
| | | | | | isoform 4. | | | |
| | | GB_PAT:A26571 | 737 | A26571 | A. officinalis AoPR1 gene. | Asparagus officinalis | 37,620 | 28-Sep-95 |
| rxa00596 | 576 | GB_PR3:AC004659 | 129577 | AC004659 | Homo sapiens chromosome 19, CIT-HSP-87m17 BAC clone, complete | Homo sapiens | 34,321 | 02-MAY-1998 |
| | | | | | sequence. | | | |
| | | GB_PR3:AC004659 | 129577 | AC004659 | Homo sapiens chromosome 19, CIT-HSP-87m17 BAC clone, complete | Homo sapiens | 35,739 | 02-MAY-1998 |
| | | | | | sequence. | | | |
| | | GB_PR1:HUMCBP2 | 2047 | D83174 | Human mRNA for collagen binding protein 2, complete cds. | Homo sapiens | 40,404 | 6-Feb-99 |
| rxa00634 | 1506 | GB_BA1:BRLBIOAD | 2272 | D14083 | Brevibacterium flavum genes for 7,8-diaminopelargonic acid | Corynebacterium | 39,111 | 3-Feb-99 |
| | | | | | aminotransferase and dethiobiotin synthetase, complete cds. | glutamicum | | |
| | | GB_PAT:E08643 | 285 | E08643 | Base sequence having the promoter function in Corynebacterium | Corynebacterium | 39,111 | 29-Sep-97 |
| | | | | | microorganisms. | glutamicum | | |
| | | GB_HTG2:AC006174 | 203407 | AC006174 | Homo sapiens chromosome 10 clone CIT987SK-1057L21 map 10q25, *** | Homo sapiens | 37,517 | 09-DEC-1998 |
| | | | | | SEQUENCING IN PROGRESS ***, 6 unordered pieces. | | | |
| rxa00665 | 601 | GB_BA1:SCI30A | 35033 | AL096811 | Streptomyces coelicolor cosmid I30A. | Streptomyces coelicolor | 38,095 | 22-Jul-99 |
| | | | | | | A3(2) | | |
| | | GB_PR3:AC002366 | 259202 | AC002366 | Human Xp22 BAC CT-285I15 (from CalTech/Research Genetics), PAC | Homo sapiens | 33,045 | 11-Jun-98 |
| | | | | | RPCI1-27C22 (from Roswell Park Cancer Center), and Cosmid U35B5 | | | |
| | | | | | (from Lawrence Livermore), complete sequence. | | | |
| | | GB_PR3:AC002366 | 259202 | AC002366 | Human Xp22 BAC CT-285I15 (from CalTech/Research Genetics), PAC | Homo sapiens | 35,214 | 11-Jun-98 |
| | | | | | RPCI1-27C22 (from Roswell Park Cancer Center), and Cosmid U35B5 | | | |
| | | | | | (from Lawrence Livermore), complete sequence. | | | |
| rxa00702 | 1830 | GB_BA1:PLNRTABC | 6449 | Z19598 | P. laminosum nrtA-PhI, nir-PhI, nrtB-PhI and nrtC-PhI genes. | Phormidium laminosum | 40,550 | 7-Feb-96 |
| | | GB_GSS10:AQ256518 | 704 | AQ256518 | nbxb0016M14r CUGI Rice BAC Library Oryza sativa genomic clone | Oryza sativa | 41,477 | 23-OCT-1998 |
| | | | | | nbxb0016M14r, genomic survey sequence. | | | |
| | | GB_BA1:AAC243194 | 1720 | AJ243194 | Alicyclobacillus acidocaldarius kdpA gene. | Alicyclobacillus | 39,740 | 21-Jun-99 |
| | | | | | | acidocaldarius | | |
| rxa00728 | 892 | GB_EST21:AA974252 | 426 | AA974252 | oq14a01.s1 NCI_CGAP_GC4 Homo sapiens cDNA clone IMAGE: 1586280 | Homo sapiens | 42,236 | 7-Jul-98 |
| | | | | | 3′ similar to SW:LIPA_ECOLI P25845 LIPOIC ACID SYNTHETASE; | | | |
| | | | | | contains MER22.t2 MER22 repetitive element;, mRNA sequence. | | | |
| | | GB_HTG2:AC004060 | 124000 | AC004060 | Homo sapiens chromosome 4, *** SEQUENCING IN PROGRESS ***, 10 | Homo sapiens | 38,106 | 21-Jul-98 |
| | | | | | unordered pieces. | | | |
| | | GB_HTG2:AC004060 | 124000 | AC004060 | Homo sapiens chromosome 4, *** SEQUENCING IN PROGRESS ***, 10 | Homo sapiens | 38,106 | 21-Jul-98 |
| | | | | | unordered pieces. | | | |
| rxa00732 | 1670 | GB_BA2:AE000241 | 10160 | AE000241 | Escherichia coli K-12 MG1655 section 131 of 400 of the complete genome. | Escherichia coli | 40,024 | 12-Nov-98 |
| | | GB_HTG3:AC010073 | 121859 | AC010073 | Homo sapiens chromosome 15 clone BAC 16E3 map 15q25, LOW-PASS | Homo sapiens | 39,001 | 11-Sep-99 |
| | | | | | SEQUENCE SAMPLING. | | | |
| | | GB_BA1:D90783 | 15399 | D90783 | E. coli genomic DNA, Kohara clone #272(32.4-32.7 min.). | Escherichia coli | 40,024 | 29-MAY-1997 |
| rxa00759 | 1047 | GB_BA1:MTV025 | 121125 | AL022121 | Mycobacterium tuberculosis H37Rv complete genome; segment 155/162. | Mycobacterium | 39,960 | 24-Jun-99 |
| | | | | | | tuberculosis | | |
| | | GB_PL1:BPNIR1 | 2472 | X60093 | B. pendula mRNA for nitrite reductase. | Betula pendula | 38,106 | 19-MAR-1992 |
| | | GB_BA1:MTV025 | 121125 | AL022121 | Mycobacterium tuberculosis H37Rv complete genome; segment 155/162. | Mycobacterium | 41,618 | 24-Jun-99 |
| | | | | | | tuberculosis | | |
| rxa00760 | 1155 | GB_BA2:AF092918 | 20758 | AF092918 | Pseudomonas alcaligenes outer membrane Xcp-secretion system gene | Pseudomonas | 40,450 | 06-DEC-1998 |
| | | | | | cluster. | alcaligenes | | |
| | | GB_BA1:SCI7 | 34893 | AL096743 | Streptomyces coelicolor cosmid I7. | Streptomyces coelicolor | 40,352 | 1-Jul-99 |
| | | GB_BA1:D90763 | 18199 | D90763 | E. coli genomic DNA, Kohara clone #252(28.1-28.4 min.). | Escherichia coli | 38,747 | 29-MAY-1997 |
| rxa00774 | 777 | GB_EST8:AA020814 | 419 | AA020814 | ze63h10.s1 Soares retina N2b4HR Homo sapiens cDNA clone | Homo sapiens | 37,500 | 30-Jan-97 |
| | | | | | IMAGE: 363715 3′ similar to PIR:A35715 A35715 fodrin alpha chain - | | | |
| | | | | | human;, mRNA sequence. | | | |
| | | GB_PL2:ATAC004521 | 104797 | AC004521 | Arabidopsis thaliana chromosome II BAC F4I1 genomic sequence, | Arabidopsis thaliana | 36,411 | 12-MAY-1998 |
| | | | | | complete sequence. | | | |
| | | GB_PL2:ATAC004521 | 104797 | AC004521 | Arabidopsis thaliana chromosome II BAC F4I1 genomic sequence, | Arabidopsis thaliana | 38,589 | 12-MAY-1998 |
| | | | | | complete sequence. | | | |
| rxa00775 | 894 | GB_BA1:MTV043 | 68848 | AL022004 | Mycobacterium tuberculosis H37Rv complete genome; segment 40/162. | Mycobacterium | 66,107 | 24-Jun-99 |
| | | | | | | tuberculosis | | |
| | | GB_BA2:AF045938 | 777 | AF045938 | Mycobacterium smegmatis putative ABC transporter nucleotide binding | Mycobacterium | 73,454 | 02-MAY-1998 |
| | | | | | subunit (mtp1) gene, complete cds. | smegmatis | | |
| | | GB_BA1:MLU15182 | 40123 | U15182 | Mycobacterium leprae cosmid B2266. | Mycobacterium leprae | 63,494 | 09-MAR-1995 |
| rxa00776 | 1044 | GB_PR3:HS453C12 | 147620 | AL021578 | Human DNA sequence from clone 453C12 on chromosome 20q12-13.12, | Homo sapiens | 35,833 | 23-Nov-99 |
| | | | | | complete sequence. | | | |
| | | GB_PR3:AC004877 | 128361 | AC004877 | Homo sapiens PAC clone DJ0751H13 from 7q35-qter, complete sequence. | Homo sapiens | 38,754 | 19-Sep-98 |
| | | GB_PR3:HS300I2 | 63796 | AL035660 | Human DNA sequence from clone 300I2 on chromosome 20q12-13.12, | Homo sapiens | 32,233 | 23-Nov-99 |
| | | | | | complete sequence. | | | |
| rxa00777 | 1188 | GB_BA1:ASAJ187 | 6213 | AJ000187 | Arthrobacter sp. catA gene. | Arthrobacter sp. | 49,694 | 5-Jul-99 |
| | | GB_IN1:CELT20D4 | 42052 | U80029 | Caenorhabditis elegans cosmid T20D4. | Caenorhabditis elegans | 36,457 | 04-DEC-1996 |
| | | GB_GSS4:AQ693388 | 531 | AQ693388 | HS_5458_A2_D10_T7A RPCI-11 Human Male BAC Library Homo sapiens | Homo sapiens | 38,123 | 6-Jul-99 |
| | | | | | genomic clone Plate = 1034 Col = 20 Row = G, genomic survey sequence. | | | |
| rxa00828 | 576 | GB_GSS1:CNS00ZMZ | 796 | AL097877 | Drosophila melanogaster genome survey sequence SP6 end of BAC | Drosophila | 39,286 | 26-Jul-99 |
| | | | | | BACN02F13 of DrosBAC library from Drosophila melanogaster (fruit fly), | melanogaster | | |
| | | | | | genomic survey sequence. | | | |
| | | GB_BA1:PSEBPH | 4169 | D16407 | Pseudomonas sp. bphE, bphG, bphF and ORF4 genes. | Pseudomonas sp. | 36,364 | 4-Feb-99 |
| | | GB_GSS9:AQ156606 | 668 | AQ156606 | nbxb0008K19r CUGI Rice BAC Library Oryza sativa genomic clone | Oryza sativa | 36,364 | 12-Sep-98 |
| | | | | | nbxb0008K19r, genomic survey sequence. | | | |
| rxa00832 | 1173 | GB_PR4:AC006504 | 210137 | AC006504 | Homo sapiens chromosome 19, BAC 326584 (CIT-B-459F4), complete | Homo sapiens | 40,545 | 4-Feb-99 |
| | | | | | sequence. | | | |
| | | GB_GSS12:AQ417775 | 642 | AQ417775 | RPCI-11-197B9.TVRPCI-11 Homo sapiens genomic clone RPCI-11- | Homo sapiens | 44,286 | 23-MAR-1999 |
| | | | | | 197B9, genomic survey sequence. | | | |
| | | GB_PR4:AC006504 | 210137 | AC006504 | Homo sapiens chromosome 19, BAC 326584 (CIT-B-459F4), complete | Homo sapiens | 35,886 | 4-Feb-99 |
| | | | | | sequence. | | | |
| rxa00934 | 1206 | GB_BA1:MLCL581 | 36225 | Z96801 | Mycobacterium leprae cosmid L581. | Mycobacterium leprae | 38,243 | 24-Jun-97 |
| | | GB_BA1:MTCY1A10 | 25949 | Z95387 | Mycobacterium tuberculosis H37Rv complete genome; segment 117/162. | Mycobacterium | 38,350 | 17-Jun-98 |
| | | | | | | tuberculosis | | |
| | | GB_PR3:HS434O14 | 135928 | AL022398 | Homo sapiens DNA sequence from PAC 434O14 on chromosome 1q32.3.-41. | Homo sapiens | 36,788 | 23-Nov-99 |
| | | | | | Contains the HSD11B1 gene for Hydroxysteroid (11-beta) | | | |
| | | | | | Dehydrogenase 1, the ADORA2BP adenosine A2b receptor LIKE | | | |
| | | | | | pseudogene, the IRF6 gene for Interferon Regulatory Factor 6 and two | | | |
| | | | | | novel genes. Contains ESTs and GSSs, complete sequence. | | | |
| rxa00939 | 1308 | GB_BA1:MTCY251 | 38380 | Z74410 | Mycobacterium tuberculosis H37Rv complete genome; segment 5/162. | Mycobacterium | 49,462 | 17-Jun-98 |
| | | | | | | tuberculosis | | |
| | | GB_PAT:I26656 | 3250 | I26656 | Sequence 1 from U.S. Pat. No. 5559011. | Unknown. | 49,462 | 07-OCT-1996 |
| | | GB_BA2:SCJ1 | 36925 | AL109962 | Streptomyces coelicolor cosmid J1. | Streptomyces coelicolor | 49,228 | 24-Sep-99 |
| | | | | | | A3(2) | | |
| rxa00942 | 327 | GB_IN1:CELT19D2 | 28406 | U42846 | Caenorhabditis elegans cosmid T19D2. | Caenorhabditis elegans | 43,910 | 19-DEC-1995 |
| | | GB_PR4:AC004905 | 134350 | AC004905 | Homo sapiens PAC clone DJ0845I21 from 7q11.21-q11.23, complete | Homo sapiens | 35,505 | 12-Jan-99 |
| | | | | | sequence. | | | |
| | | GB_IN1:CELF18C5 | 29095 | U29097 | Caenorhabditis elegans cosmid F18C5. | Caenorhabditis elegans | 37,107 | 15-Jun-95 |
| rxa00950 | 1029 | GB_BA1:SLTNRB | 2849 | X73633 | S. longisporoflavus TnrB gene. | Streptomyces | 52,255 | 9-Aug-94 |
| | | | | | | longisporoflavus | | |
| | | GB_BA1:MTCI364 | 29540 | Z93777 | Mycobacterium tuberculosis H37Rv complete genome; segment 52/162. | Mycobacterium | 38,872 | 17-Jun-98 |
| | | | | | | tuberculosis | | |
| | | GB_BA1:MSGY367 | 35336 | AD000008 | Mycobacterium tuberculosis sequence from clone y367. | Mycobacterium | 39,921 | 03-DEC-1996 |
| | | | | | | tuberculosis | | |
| rxa00960 | 1058 | GB_PL2:ATAC009325 | 105543 | AC009325 | Arabidopsis thaliana chromosome III BAC F4P13 genomic sequence, | Arabidopsis thaliana | 36,074 | 08-OCT-1999 |
| | | | | | complete sequence. | | | |
| | | GB_BA2:U59485 | 29078 | U59485 | Agrobacterium tumefaciens AtrC (atrC) gene, partial cds; AtrB (atrB), AtrA | Agrobacterium | 39,884 | 16-Jul-99 |
| | | | | | (atrA), AttA1 (attA1), AttA2 (attA2), AttB (attB), AttC (attC), AttD (attD), AttE | tumefaciens | | |
| | | | | | (attE), and AttF (attF) genes, complete cds; AttG (attG) gene, alternative | | | |
| | | | | | splice products, complete cds; AttH (attH), AttI (attI), AttJ (attJ), AttK (attK), | | | |
| | | | | | AttL (attL), AttM (attM), AttO (attO), AttP (attP), AttR (attR), AttS (attS), AttT | | | |
| | | | | | (attT), AttU (attU), attV (attV), AttW (attW), AttX (attX), AttY (attY), AttZ | | | |
| | | | | | (attZ), AtsA (atsA), AtsB (atsB), AtsC (atsC), and AtsD (atsD) genes, | | | |
| | | | | | complete cds; and AtsE (atsE) gene, partial cds. | | | |
| | | GB_PL2:ATAC009325 | 105543 | AC009325 | Arabidopsis thaliana chromosome III BAC F4P13 genomic sequence, | Arabidopsis thaliana | 36,162 | 08-OCT-1999 |
| | | | | | complete sequence. | | | |
| rxa00980 | 1917 | GB_BA1:MTCY10D7 | 39800 | Z79700 | Mycobacterium tuberculosis H37Rv complete genome; segment 44/162. | Mycobacterium | 48,176 | 17-Jun-98 |
| | | | | | | tuberculosis | | |
| | | GB_GSS10:AQ255373 | 639 | AQ255373 | mgxb0012D24r CUGI Rice Blast BAC Library Magnaporthe grisea genomic | Magnaporthe grisea | 38,624 | 23-OCT-1998 |
| | | | | | clone mgxb0012D24r, genomic survey sequence. | | | |
| | | GB_EST26:AU004809 | 728 | AU004809 | AU004809 Bombyx mori p50(Daizo) Bombyx mori cDNA clone ws20873, | Bombyx mori | 38,223 | 19-Jan-99 |
| | | | | | mRNA sequence. | | | |
| rxa01000 | | | | | | | | |
| rxa01002 | 927 | GB_BA2:AE001197 | 10039 | AE001197 | Treponema pallidum section 13 of 87 of the complete genome. | Treponema pallidum | 37,161 | 16-Jul-98 |
| | | GB_PL1:HVPGLYH | 3790 | Y10099 | H. vulgare mRNA for novel P-glycoprotein homologue. | Hordeum vulgare | 42,239 | 24-OCT-1997 |
| | | GB_IN1:AB003329 | 4328 | AB003329 | Leishmania amazonensis LaMDR1 multidrug resistance gene, complete | Leishmania | 40,176 | 24-MAR-1999 |
| | | | | | cds. | amazonensis | | |
| rxa01003 | 927 | GB_HTG2:HSJ168B21 | 67973 | AL118518 | Homo sapiens chromosome 6 clone RP1-168B21 map q26-27, *** | Homo sapiens | 35,159 | 03-DEC-1999 |
| | | | | | SEQUENCING IN PROGRESS ***, in unordered pieces. | | | |
| | | GB_HTG2:HSJ168B21 | 67973 | AL118518 | Homo sapiens chromosome 6 clone RP1-168B21 map q26-27, *** | Homo sapiens | 35,159 | 03-DEC-1999 |
| | | | | | SEQUENCING IN PROGRESS ***, in unordered pieces. | | | |
| | | GB_HTG2:HSJ168B21 | 67973 | AL118518 | Homo sapiens chromosome 6 clone RP1-168B21 map q26-27, *** | Homo sapiens | 39,956 | 03-DEC-1999 |
| | | | | | SEQUENCING IN PROGRESS ***, in unordered pieces. | | | |
| rxa01006 | 958 | GB_IN2:S74163 | 2630 | S74163 | Drosophila sp. T-related protein (Trg) mRNA, complete cds. | Drosophila sp. | 37,131 | 06-OCT-1999 |
| | | GB_PR4:AF130343 | 292721 | AF130343 | Homo sapiens chromosome 8 clone PAC 87.2 map 8q24.1, complete | Homo sapiens | 34,398 | 9-Jul-99 |
| | | | | | sequence. | | | |
| | | GB_HTG3:AC009415 | 186991 | AC009415 | Homo sapiens clone NH0576H09,*** SEQUENCING IN PROGRESS ***, | Homo sapiens | 36,325 | 21-Aug-99 |
| | | | | | 5 unordered pieces. | | | |
| rxa01012 | 1764 | GB_BA1:SYOATPBP | 2883 | D14438 | Synechococcus elongatus genes for ATP-binding protein and Mn- | Synechococcus | 50,346 | 3-Feb-99 |
| | | | | | stabilizing protein. | elongatus | | |
| | | GB_BA1:BSU20909 | 6404 | U20909 | Bacillus subtilis permease system App operon AppD (appD), AppF(appF), | Bacillus subtilis | 50,376 | 23-Feb-95 |
| | | | | | AppA (appA), AppB (appB), and AppC (appC) genes, complete cds. | | | |
| | | GB_BA2:ECOPOTABCD | 4385 | M64519 | E. coli transport protein (potA, potB, potC and potD) genes, complete cds. | Escherichia coli | 42,881 | 17-Jun-96 |
| rxa01013 | 818 | GB_IN2:AC005930 | 41284 | AC005930 | Leishmania major chromosome 3 clone L712 strain Friedlin, complete | Leishmania major | 40,444 | 13-Nov-99 |
| | | | | | sequence. | | | |
| | | GB_PR2:HS1110P6 | 40033 | AL049175 | Human DNA sequence from clone 1110P6 on chromosome Xq21.1-22.3. | Homo sapiens | 36,981 | 23-Nov-99 |
| | | | | | Contains a putative CpG island, complete sequence. | | | |
| | | GB_IN2:AC005930 | 41284 | AC005930 | Leishmania major chromosome 3 clone L712 strain Friedlin, complete | Leishmania major | 44,121 | 13-Nov-99 |
| | | | | | sequence. | | | |
| rxa01070 | 1509 | GB_BA2:U32795 | 10038 | U32795 | Haemophilus influenzae Rd section 110 of 163 of the complete genome. | Haemophilus influenzae | 44,668 | 29-MAY-1998 |
| | | | | | | Rd | | |
| | | GB_PR4:AC004985 | 159507 | AC004985 | Homo sapiens clone DJ1165K10, complete sequence. | Homo sapiens | 37,508 | 7-Aug-99 |
| | | GB_PR3:AC005244 | 127506 | AC005244 | Homo sapiens chromosome 17, clone hRPK.471_L_13, complete | Homo sapiens | 33,176 | 7-Aug-98 |
| | | | | | sequence. | | | |
| rxa01094 | 736 | GB_BA1:CORPYKI | 2795 | L27126 | Corynebacterium pyruvate kinase gene, complete cds. | Corynebacterium | 99,558 | 07-DEC-1994 |
| | | | | | | glutamicum | | |
| | | GB_BA1:SC4G6 | 36917 | AL096884 | Streptomyces coelicolor cosmid 4G6. | Streptomyces coelicolor | 37,569 | 23-Jul-99 |
| | | | | | | A3(2) | | |
| | | GB_HTG1:CNS01DS1 | 216986 | AL121612 | Homo sapiens chromosome 14 clone R-179A9, *** SEQUENCING IN | Homo sapiens | 38,577 | 15-OCT-1999 |
| | | | | | PROGRESS ***, in unordered pieces. | | | |
| rxa01141 | 948 | GB_HTG2:HSJ395C13 | 150336 | AL117344 | Homo sapiens chromosome 6 clone RP3-395C13 map q25.2-26, *** | Homo sapiens | 36,538 | 03-DEC-1999 |
| | | | | | SEQUENCING IN PROGRESS ***, in unordered pieces. | | | |
| | | GB_HTG2:HSJ395C13 | 150336 | AL117344 | Homo sapiens chromosome 6 clone RP3-395C13 map q25.2-26, *** | Homo sapiens | 36,538 | 03-DEC-1999 |
| | | | | | SEQUENCING IN PROGRESS ***, in unordered pieces. | | | |
| | | GB_HTG2:HSJ395C13 | 150336 | AL117344 | Homo sapiens chromosome 6 clone RP3-395C13 map q25.2-26, | Homo sapiens | 37,908 | 03-DEC-1999 |
| | | | | | ***SEQUENCING IN PROGRESS ***, in unordered pieces. | | | |
| rxa01142 | 621 | GB_BA1:CORAIA | 4705 | L09232 | Corynebacterium glutamicum acetohydroxy acid synthase (ilvB) and (ilvN) | Corynebacterium | 35,897 | 23-Feb-95 |
| | | | | | genes, and acetohydroxy acid isomeroreductase (ilvC) gene, complete cds. | glutamicum | | |
| | | GB_BA1:SCH35 | 45396 | AL078610 | Streptomyces coelicolor cosmid H35. | Streptomyces coelicolor | 52,295 | 4-Jun-99 |
| | | GB_BA2:AFACHRRA | 7390 | J05278 | Ralstonia eutropha ChrB (chrB), ChrA (chrA), ChrC (chrC), ChrD (chrD), | Ralstonia eutropha | 54,589 | 26-MAR-1999 |
| | | | | | YbiB (ybiB), pirin, and heat shock protein sigma-32 (RP32) genes, | | | |
| | | | | | complete cds. | | | |
| rxa01164 | 1758 | GB_GSS14:AQ555104 | 609 | AQ555104 | RPCI-11-415H1.TJ RPCI-11 Homo sapiens genomic clone RPCI-11- | Homo sapiens | 40,000 | 28-MAY-1999 |
| | | | | | 415H1, genomic survey sequence. | | | |
| | | GB_BA2:AE000309 | 13453 | AE000309 | Escherichia coli K-12 MG1655 section 199 of 400 of the complete genome. | Escherichia coli | 39,261 | 12-Nov-98 |
| | | GB_GSS14:AQ548213 | 668 | AQ548213 | RPCI-11-415H4.TV RPCI-11 Homo sapiens genomic clone RPCI-11- | Homo sapiens | 41,176 | 28-MAY-1999 |
| | | | | | 415H4, genomic survey sequence. | | | |
| rxa01168 | 933 | GB_BA1:MTV018 | 53450 | AL021899 | Mycobacterium tuberculosis H37Rv complete genome; segment 90/162. | Mycobacterium | 38,033 | 18-Jun-98 |
| | | | | | | tuberculosis | | |
| | | GB_PL2:ATAC003033 | 84254 | AC003033 | Arabidopsis thaliana chromosome II BAC T21L14 genomic sequence, | Arabidopsis thaliana | 37,486 | 19-DEC-1997 |
| | | | | | complete sequence. | | | |
| | | GB_PL2:ATAC003033 | 84254 | AC003033 | Arabidopsis thaliana chromosome II BAC T21L14 genomic sequence, | Arabidopsis thaliana | 38,142 | 19-DEC-1997 |
| | | | | | complete sequence. | | | |
| rxa01185 | 667 | GB_BA2:AF013987 | 3150 | AF013987 | Vibrio cholerae strain 0395 putative ABC transporter ATP-binding protein, | Vibrio cholerae | 44,128 | 21-MAY-1998 |
| | | | | | sigma54 (rpoN), putative sigma54 modulation protein and nitrogen | | | |
| | | | | | regulatory IIA protein (ptsN) genes, complete cds. | | | |
| | | GB_BA1:SASTPSMP | 1848 | Z30588 | S. aureus (RN4220) genes for potential ABC transporter and potential | Staphylococcus aureus | 43,402 | 25-MAY-1995 |
| | | | | | membrane spanning protein. | | | |
| | | GB_PR3:HS357I16 | 134506 | AL021921 | Homo sapiens DNA sequence from PAC 357I16 on chromosome 1p36.13. | Homo sapiens | 38,957 | 23-Nov-99 |
| | | | | | Contains GSSs, genomic marker D1S449 and a CA repeat polymorphism, | | | |
| | | | | | complete sequence. | | | |
| rxa01188 | 1227 | GB_PR3:HSN21F1 | 39212 | Z94162 | Human DNA sequence from cosmid N21F1 on chromosome 22 Contains | Homo sapiens | 37,277 | 23-Nov-99 |
| | | | | | exon trap and STS, complete sequence. | | | |
| | | GB_EST38:AW066174 | 455 | AW066174 | 687007C06.y1 687 —Early embryo from Delaware Zea mays cDNA, mRNA | Zea mays | 42,439 | 12-OCT-1999 |
| | | | | | sequence. | | | |
| | | GB_GSS4:AQ719542 | 493 | AQ719542 | HS_5529_B2_A02_SP6E RPCI-11 Human Male BAC Library Homo | Homo sapiens | 39,837 | 14-Jul-99 |
| | | | | | sapiens genomic clone Plate = 1105 Col = 4 Row = B, genomic survey | | | |
| | | | | | sequence. | | | |
| rxa01247 | 357 | GB_BA2:AF127374 | 63734 | AF127374 | Streptomyces lavendulae LinA homolog, cytochrome P450 hydroxylase | Streptomyces | 38,592 | 27-MAY-1999 |
| | | | | | ORF4, cytochrome P450 hydroxylase ORF3, MitT (mitT), MitS (mitS), MitR | lavendulae | | |
| | | | | | (mitR), MitQ (mitQ), MitP (mitP), MitO (mitO), MitN (mitN), MitM (mitM), | | | |
| | | | | | MitL (mitL), MitK (mitK), MitJ (mitJ), MitI (mitI), MitH (mitH), MitG (mitG), | | | |
| | | | | | MitF (mitF), MitE (mitE), MitD (mitD), MitC (mitC), MitB (mitB), MitA (mitA), | | | |
| | | | | | MmcA (mmcA), MmcB (mmcB), MmcC (mmcC), MmcD (mmcD), | | | |
| | | | | | MmcE (mmcE), MmcF (mmcF), MmcG (mmcG), MmcH (mmcH), MmcI | | | |
| | | | | | (mmcI), MmcJ (mmcJ), MmcK (mmcK), MmcL (mmcL), MmcM (mmcM), | | | |
| | | | | | MmcN (mmcN), MmcO (mmcO), Mrd (mrd), MmcP (mmcP), MmcQ | | | |
| | | | | | (mmcQ), MmcR (mmcR), MmcS (mmcS), MmcT (mmcT), MmcU (mmcU), | | | |
| | | | | | MmcV (mmcV), Mct (mct), MmcW (mmcW), MmcX (mmcX), and MmcY | | | |
| | | | | | (mmcY) genes, complete cds; and unknown genes. | | | |
| | | GB_BA2:AF127374 | 63734 | AF127374 | Streptomyces lavendulae LinA homolog, cytochrome P450 hydroxylase | Streptomyces | 45,915 | 27-MAY-1999 |
| | | | | | ORF4, cytochrome P450 hydroxylase ORF3, MitT (mitT), MitS (mitS), MitR | lavendulae | | |
| | | | | | (mitR), MitQ (mitQ), MitP (mitP), MitO (mitO), MitN (mitN), MitM (mitM), | | | |
| | | | | | MitL (mitL), MitK (mitK), MitJ (mitJ), MitI (mitI), MitH (mitH), MitG (mitG), | | | |
| | | | | | MitF (mitF), MitE (mitE), MitD (mitD), MitC (mitC), MitB (mitB), MitA (mitA), | | | |
| | | | | | MmcA (mmcA), MmcB (mmcB), MmcC (mmcC), MmcD (mmcD), | | | |
| | | | | | MmcE (mmcE), MmcF (mmcF), MmcG (mmcG), MmcH (mmcH), MmcI | | | |
| | | | | | (mmcI), MmcJ (mmcJ), MmcK (mmcK), MmcL (mmcL), MmcM (mmcM), | | | |
| | | | | | MmcN (mmcN), MmcO (mmcO), Mrd (mrd), MmcP (mmcP), MmcQ | | | |
| | | | | | (mmcQ), MmcR (mmcR), MmcS (mmcS), MmcT (mmcT), MmcU (mmcU), | | | |
| | | | | | MmcV (mmcV), Mct (mct), MmcW (mmcW), MmcX (mmcX), and MmcY | | | |
| | | | | | (mmcY) genes, complete cds; and unknown genes. | | | |
| | | GB_PR4:AC006039 | 176257 | AC006039 | Homo sapiens clone NH0319F03, complete sequence. | Homo sapiens | 30,899 | 05-MAY-1999 |
| rxa01285 | 749 | GB_BA1:SCI51 | 40745 | AL109848 | Streptomyces coelicolor cosmid I51. | Streptomyces coelicolor | 38,627 | 16-Aug-99 |
| | | | | | | A3(2) | | |
| | | GB_BA2:SCF34 | 38995 | AL109974 | Streptomyces coelicolor cosmid F34. | Streptomyces coelicolor | 38,586 | 24-Sep-99 |
| | | | | | | A3(2) | | |
| | | GB_BA2:MSU10425 | 4261 | U10425 | Mycobacterium smegmatis ferric exochelin uptake proteins FxuB (fxuB), | Mycobacterium | 61,230 | 07-DEC-1994 |
| | | | | | FxuA (fxuA) genes, complete cds, FxuC (fxuC) gene, partial cds, and ferric | smegmatis | | |
| | | | | | exochelin biosynthesis protein FxbA (fxbA) gene, complete cds. | | | |
| rxa01289 | 1167 | GB_BA1:SCI51 | 40745 | AL109848 | Streptomyces coelicolor cosmid I51. | Streptomyces coelicolor | 35,456 | 16-Aug-99 |
| | | | | | | A3(2) | | |
| | | GB_BA1:SCI51 | 40745 | AL109848 | Streptomyces coelicolor cosmid I51. | Streptomyces coelicolor | 37,576 | 16-Aug-99 |
| | | | | | | A3(2) | | |
| | | GB_EST31:AI704930 | 227 | AI704930 | UI-R-AB1-ys-c-07-0-UI.s1 UI-R-AB1 Rattus norvegicus cDNA clone UI-R- | Rattus norvegicus | 38,326 | 3-Jun-99 |
| | | | | | AB1-ys-c-07-0-UI 3′, mRNA sequence. | | | |
| rxa01290 | 1287 | GB_HTG2:AC006892 | 299081 | AC006892 | Caenorhabditis elegans clone Y69A2, *** SEQUENCING IN PROGRESS | Caenorhabditis elegans | 33,727 | 26-Feb-99 |
| | | | | | ***, 10 unordered pieces. | | | |
| | | GB_HTG2:AC006892 | 299081 | AC006892 | Caenorhabditis elegans clone Y69A2, *** SEQUENCING IN PROGRESS | Caenorhabditis elegans | 33,727 | 26-Feb-99 |
| | | | | | ***, 10 unordered pieces. | | | |
| | | GB_PR3:HS508I15 | 131353 | AL021707 | Human DNA sequence from clone 508I15 on chromosome 22q12-13 | Homo sapiens | 34,803 | 23-Nov-99 |
| | | | | | Contains gene for GTPBP1 (GTP binding protein 1), two novel genes | | | |
| | | | | | KIAA0063 and KIAA0668, an mRNA, ESTs, STSs, GSSs, a CA repeat | | | |
| | | | | | (D22S272) and CpG islands, complete sequence. | | | |
| rxa01297 | 921 | GB_BA1:MTCY16B7 | 43430 | Z81331 | Mycobacterium tuberculosis H37Rv complete genome; segment 123/162. | Mycobacterium | 38,133 | 17-Jun-98 |
| | | | | | | tuberculosis | | |
| | | GB_BA1:MSGY414A | 40121 | AD000007 | Mycobacterium tuberculosis sequence from clone y414a. | Mycobacterium | 61,716 | 03-DEC-1996 |
| | | | | | | tuberculosis | | |
| | | GB_HTG4:AC010181 | 185244 | AC010181 | Homo sapiens chromosome 3 seeders clone RPCI11-68L1, *** | Homo sapiens | 34,807 | 21-OCT-1999 |
| | | | | | SEQUENCING IN PROGRESS ***, 26 unordered pieces. | | | |
| rxa01298 | 1053 | GB_BA1:MTCY16B7 | 43430 | Z81331 | Mycobacterium tuberculosis H37Rv complete genome; segment 123/162. | Mycobacterium | 38,160 | 17-Jun-98 |
| | | | | | | tuberculosis | | |
| | | GB_BA1:MSGY414A | 40121 | AD000007 | Mycobacterium tuberculosis sequence from clone y414a. | Mycobacterium | 58,611 | 03-DEC-1996 |
| | | | | | | tuberculosis | | |
| | | GB_PL1:SCYJL013C | 2289 | Z49288 | S. cerevisiae chromosome X reading frame ORF YJL013c. | Saccharomyces | 36,180 | 11-Aug-97 |
| | | | | | | cerevisiae | | |
| rxa01303 | 1458 | GB_BA1:TTAJ5043 | 837 | AJ225043 | Thermus thermophilus partial narK gene. | Thermus thermophilus | 55,245 | 18-Jun-98 |
| | | GB_PL2:AC010675 | 84723 | AC010675 | Arabidopsis thaliana chromosome I BAC T17F3 genomic sequence, | Arabidopsis thaliana | 37,058 | 11-Nov-99 |
| | | | | | complete sequence. | | | |
| | | GB_GSS9:AQ170862 | 518 | AQ170862 | HS_3165_B2_F03_T7 CIT Approved Human Genomic Sperm Library D | Homo sapiens | 38,610 | 17-OCT-1998 |
| | | | | | Homo sapiens genomic clone Plate = 3165 Col = 6 Row = L, genomic survey | | | |
| | | | | | sequence. | | | |
| rxa01323 | 2388 | GB_BA1:MTCY10D7 | 39800 | Z79700 | Mycobacterium tuberculosis H37Rv complete genome; segment 44/162. | Mycobacterium | 53,376 | 17-Jun-98 |
| | | | | | | tuberculosis | | |
| | | GB_BA1:MTCY39 | 38500 | Z74025 | Mycobacterium tuberculosis H37Rv complete genome; segment 89/162. | Mycobacterium | 39,197 | 17-Jun-98 |
| | | | | | | tuberculosis | | |
| | | GB_BA1:MTCY251 | 38380 | Z74410 | Mycobacterium tuberculosis H37Rv complete genome; segment 5/162. | Mycobacterium | 52,698 | 17-Jun-98 |
| | | | | | | tuberculosis | | |
| rxa01338 | 1925 | GB_IN1:DROPROS | 6422 | M81389 | D. melanogaster Pros protein (prospero) mRNA, complete cds. | Drosophila | 37,229 | 26-Apr-93 |
| | | | | | | melanogaster | | |
| | | GB_EST9:AA060074 | 688 | AA060074 | mj73f07.r1 Soares mouse p3NMF19.5 Mus musculus cDNA clone | Mus musculus | 39,919 | 23-Sep-96 |
| | | | | | IMAGE: 481765 5′ similar to gb: X00246 Mouse mRNA with a Set 1 | | | |
| | | | | | repetitive element for a class I (MOUSE);, mRNA sequence. | | | |
| | | GB_EST16:AA560009 | 437 | AA560009 | vI16a01.r1 Stratagene mouse Tcell 937311 Mus musculus cDNA clone | Mus musculus | 37,071 | 18-Aug-97 |
| | | | | | IMAGE: 972360 5′, mRNA sequence. | | | |
| rxa01395 | 294 | GB_BA1:CGLYSEG | 2374 | X96471 | C. glutamicum lysE and lysG genes. | Corynebacterium | 38,462 | 24-Feb-97 |
| | | | | | | glutamicum | | |
| | | GB_IN1:CELF28B3 | 36262 | AF003136 | Caenorhabditis elegans cosmid F28B3. | Caenorhabditis elegans | 37,241 | 31-DEC-1997 |
| | | GB_GSS13:AQ486324 | 573 | AQ486324 | RPCI-11-264E18.TJ RPCI-11 Homo sapiens genomic clone RPCI-11- | Homo sapiens | 39,785 | 24-Apr-99 |
| | | | | | 264E18, genomic survey sequence. | | | |
| rxa01411 | 888 | GB_EST24:AU035428 | 756 | AU035428 | AU035428 Sugano mouse brain mncb Mus musculus cDNA clone MNCb- | Mus musculus | 37,112 | 08-OCT-1998 |
| | | | | | 0438, mRNA sequence. | | | |
| | | GB_GSS12:AQ399225 | 621 | AQ399225 | mgxb0019C11f CUGI Rice Blast BAC Library Magnaporthe grisea genomic | Magnaporthe grisea | 36,430 | 06-MAR-1999 |
| | | | | | clone mgxb0019C11f, genomic survey sequence. | | | |
| | | GB_EST18:T42211 | 337 | T42211 | 5474 Lambda-PRL2 Arabidopsis thaliana cDNA clone 111C20T7, mRNA | Arabidopsis thaliana | 42,433 | 7-Jan-98 |
| | | | | | sequence. | | | |
| rxa01454 | 367 | GB_GSS5:AQ818876 | 486 | AQ818876 | HS_5297_B1_E12_SP6E RPCI-11 Human Male BAC Library Homo | Homo sapiens | 36,585 | 26-Aug-99 |
| | | | | | sapiens genomic clone Plate = 873 Col = 23 Row = J, genomic survey | | | |
| | | | | | sequence. | | | |
| | | GB_EST19:AA778691 | 650 | AA778691 | af87h03.s1 Soares_testis_NHT Homo sapiens cDNA clone 1049045 3′ | Homo sapiens | 32,344 | 5-Feb-98 |
| | | | | | similar to contains L1.t2 L1 repetitive element;, mRNA sequence. | | | |
| | | GB_GSS15:AQ599724 | 543 | AQ599724 | HS_5354_B1_B01_T7A RPCI-11 Human Male BAC Library Homo sapiens | Homo sapiens | 39,773 | 10-Jun-99 |
| | | | | | genomic clone Plate = 930 Col = 1 Row = D, genomic survey sequence. | | | |
| rxa01455 | 585 | GB_PL2:AF002169 | 5217 | AF002169 | Neurospora crassa coxl translation protein CYA5 (cya5) gene, complete | Neurospora crassa | 39,161 | 24-MAR-1999 |
| | | | | | cds. | | | |
| | | GB_PL2:AF002169 | 5217 | AF002169 | Neurospora crassa coxl translation protein CYA5 (cya5) gene, complete | Neurospora crassa | 37,565 | 24-MAR-1999 |
| | | | | | cds. | | | |
| rxa01625 | 324 | GB_EST36:AV200593 | 300 | AV200593 | AV200593 Yuji Kohara unpublished cDNA Caenorhabditis elegans cDNA | Caenorhabditis elegans | 43,284 | 26-Jul-99 |
| | | | | | clone yk577f10 3′, mRNA sequence. | | | |
| | | GB_PL1:S48358 | 414 | S48358 | tRNA Trp [Saccharomyces cerevisiae, Genomic, 414 nt]. | Saccharomyces | 37,143 | 08-MAY-1993 |
| | | | | | | cerevisiae | | |
| | | GB_GSS8:AQ005856 | 390 | AQ005856 | CIT-HSP-2292G20.TR CIT-HSP Homo sapiens genomic clone 2292G20, | Homo sapiens | 39,205 | 27-Jun-98 |
| | | | | | genomic survey sequence. | | | |
| rxa01756 | 1431 | GB_HTG4:AC009886 | 163668 | AC009886 | Homo sapiens chromosome 15 clone 437_N_14 map 15, *** | Homo sapiens | 35,865 | 19-OCT-1999 |
| | | | | | SEQUENCING IN PROGRESS ***, 11 unordered pieces. | | | |
| | | GB_HTG4:AC009886 | 163668 | AC009886 | Homo sapiens chromosome 15 clone 437_N_14 map 15, *** | Homo sapiens | 35,865 | 19-OCT-1999 |
| | | | | | SEQUENCING IN PROGRESS ***, 11 unordered pieces. | | | |
| | | GB_EST6:N47950 | 424 | N47950 | yy84d12.s1 Soares_multiple_sclerosis_2NbHMSP Homo sapiens cDNA | Homo sapiens | 38,261 | 14-Feb-96 |
| | | | | | clone IMAGE: 280247 3′, mRNA sequence. | | | |
| rxa01808 | 1172 | GB_BA1:SEABCT | 1976 | X80735 | S. erythraea (NCIMB 8594) ertX gene for putative ABC tranporter. | Saccharopolyspora | 63,607 | 07-DEC-1995 |
| | | | | | | erythraea | | |
| | | GB_BA1:MTV047 | 10866 | AL022002 | Mycobacterium tuberculosis H37Rv complete genome; segment 75/162. | Mycobacterium | 40,563 | 17-Jun-98 |
| | | | | | | tuberculosis | | |
| | | GB_BA1:ECOUW93 | 338534 | U14003 | Escherichia coli K-12 chromosomal region from 92.8 to 00.1 minutes. | Escherichia coli | 35,112 | 17-Apr-96 |
| rxa01822 | 605 | GB_HTG3:AC008480 | 106822 | AC008480 | Homo sapiens chromosome 5 clone CIT-HSPC_397O13, *** | Homo sapiens | 35,940 | 3-Aug-99 |
| | | | | | SEQUENCING IN PROGRESS ***, 36 unordered pieces. | | | |
| | | GB_HTG3:AC008480 | 106822 | AC008480 | Homo sapiens chromosome 5 clone CIT-HSPC_397O13, *** | Homo sapiens | 35,940 | 3-Aug-99 |
| | | | | | SEQUENCING IN PROGRESS ***, 36 unordered pieces. | | | |
| | | GB_PL2:CNS01B8L | 660 | AL113917 | Botrytis cinerea strain T4 cDNA library under conditions of nitrogen | Botryotinia fuckeliana | 43,322 | 2-Sep-99 |
| | | | | | deprivation. | | | |
| rxa01900 | 1422 | GB_BA2:AF056309 | 4346 | AF056309 | Streptomyces argillaceus membrane protein and mithramycin regulator | Streptomyces | 39,199 | 27-Jan-99 |
| | | | | | MtmR (mtmR) genes, complete cds. | argillaceus | | |
| | | GB_EST25:AU045582 | 273 | AU045582 | AU045582 Mouse sixteen-cell-embryo cDNA Mus musculus cDNA clone | Mus musculus | 61,172 | 09-DEC-1998 |
| | | | | | J0937H06 3′, mRNA sequence. | | | |
| | | GB_EST15:AA458642 | 217 | AA458642 | aa16b10.s1 Soares_NhHMPu_S1 Homo sapiens cDNA clone | Homo sapiens | 43,056 | 9-Jun-97 |
| | | | | | IMAGE: 813403 3′ similar to TR: G496330 G496330 IKBL MRNA.;, mRNA | | | |
| | | | | | sequence. | | | |
| rxa01939 | 1854 | GB_BA1:MTV025 | 121125 | AL022121 | Mycobacterium tuberculosis H37Rv complete genome; segment 155/162. | Mycobacterium | 38,145 | 24-Jun-99 |
| | | | | | | tuberculosis | | |
| | | GB_BA1:SC2A11 | 22789 | AL031184 | Streptomyces coelicolor cosmid 2A11. | Streptomyces coelicolor | 45,783 | 5-Aug-98 |
| | | GB_BA2:AE000431 | 11575 | AE000431 | Escherichia coli K-12 MG1655 section 321 of 400 of the complete genome. | Escherichia coli | 38,384 | 12-Nov-98 |
| rxa01972 | 717 | GB_HTG2:AC007650 | 166670 | AC007650 | Drosophila melanogaster chromosome 3 clone BACR30G22 (D688) RPCI- | Drosophila | 37,712 | 2-Aug-99 |
| | | | | | 98 30.G.22 map 87F-87F strain y; cn bw sp, *** SEQUENCING IN | melanogaster | | |
| | | | | | PROGRESS ***, 101 unordered pieces. | | | |
| | | GB_HTG2:AC007650 | 166670 | AC007650 | Drosophila melanogaster chromosome 3 clone BACR30G22 (D688) RPCI- | Drosophila | 37,712 | 2-Aug-99 |
| | | | | | 98 30.G.22 map 87F-87F strain y; cn bw sp, *** SEQUENCING IN | melanogaster | | |
| | | | | | PROGRESS ***, 101 unordered pieces. | | | |
| | | GB_HTG2:AC008204 | 138364 | AC008204 | Drosophila melanogaster chromosome 3 clone BACR04E17 (D762) RPCI- | Drosophila | 36,827 | 2-Aug-99 |
| | | | | | 98 04.E.17 map 95E-95F strain y; cn bw sp, *** SEQUENCING IN | melanogaster | | |
| | | | | | PROGRESS***, 96 unordered pieces. | | | |
| rxa01995 | 1461 | GB_HTG7:AC008065 | 172383 | AC008065 | Homo sapiens clone RP11-284E18, *** SEQUENCING IN PROGRESS ***, | Homo sapiens | 37,213 | 09-DEC-1999 |
| | | | | | 4 unordered pieces. | | | |
| | | GB_GSS5:AQ805794 | 426 | AQ805794 | HS_3192_A2_C04_MR CIT Approved Human Genomic Sperm Library D | Homo sapiens | 41,148 | 9-Aug-99 |
| | | | | | Homo sapiens genomic clone Plate = 3192 Col = 8 Row = E, genomic survey | | | |
| | | | | | sequence. | | | |
| | | GB_GSS10:AQ173736 | 436 | AQ173736 | HS_3194_A1_C04_MR CIT Approved Human Genomic Sperm Library D | Homo sapiens | 40,421 | 17-OCT-1998 |
| | | | | | Homo sapiens genomic clone Plate = 3194 Col = 7 Row = E, genomic survey | | | |
| | | | | | sequence. | | | |
| rxa02034 | 1089 | GB_PR4:AC002531 | 197900 | AC002531 | Homo sapiens chromosome Y, clone 486_O_8, complete sequence. | Homo sapiens | 36,934 | 13-OCT-1999 |
| | | GB_PR2:HSB7L1C4 | 106710 | AL078476 | Homo sapiens chromosome 21 BAC B7L1C4, complete sequence. | Homo sapiens | 34,454 | 9-Nov-99 |
| | | GB_IN2:CELF26D11 | 36161 | AF068716 | Caenorhabditis elegans cosmid F26D11. | Caenorhabditis elegans | 36,524 | 29-MAY-1998 |
| rxa02035 | | | | | | | | |
| rxa02062 | 1293 | GB_BA1:MTCI364 | 29540 | Z93777 | Mycobacterium tuberculosis H37Rv complete genome; segment 52/162. | Mycobacterium | 38,606 | 17-Jun-98 |
| | | | | | | tuberculosis | | |
| | | GB_EST34:AV153141 | 305 | AV153141 | AV153141 Mus musculus hippocampus C57BL/6J adult Mus musculus | Mus musculus | 37,705 | 7-Jul-99 |
| | | | | | cDNA clone 2900053B17, mRNA sequence. | | | |
| | | GB_BA1:PHU88400 | 3855 | U88400 | Prochlorothrix hollandica hoxUYH operon, hydrogenase diaphorase subunit | Prochlorothrix | 38,712 | 05-MAY-1997 |
| | | | | | (hoxU) gene, partial cds, and bidirectional hydrogenase small subunit | hollandica | | |
| | | | | | (hoxY), unknown protein, and bidirectional hydrogenase large subunit | | | |
| | | | | | (hoxH) genes, complete cds. | | | |
| rxa02068 | 1230 | GB_GSS13:AQ488513 | 673 | AQ488513 | RPCI-11-243J24.TV RPCI-11 Homo sapiens genomic clone RPCI-11- | Homo sapiens | 36,567 | 24-Apr-99 |
| | | | | | 243J24, genomic survey sequence. | | | |
| | | GB_GSS13:AQ488513 | 673 | AQ488513 | RPCI-11-243J24.TV RPCI-11 Homo sapiens genomic clone RPCI-11- | Homo sapiens | 36,567 | 24-Apr-99 |
| | | | | | 243J24, genomic survey sequence. | | | |
| rxa02079 | 738 | GB_PR4:AC006531 | 167525 | AC006531 | Homo sapiens chromosome 16 clone 113K5, complete sequence. | Homo sapiens | 37,870 | 7-Feb-99 |
| | | GB_BA1:DLARGD | 1471 | L42615 | Deleya cupida 16S ribosomal RNA (16S rRNA) gene. | Halomonas cupida | 40,476 | 3-Jan-96 |
| | | GB_BA1:AF009342 | 1482 | AF009342 | Haemophilus ducreyi ribosomal protein L11 gene, partial cds, and | Haemophilus ducreyi | 34,813 | 22-Jul-97 |
| | | | | | ribosomal protein L1 gene, complete cds. | | | |
| rxa02096 | 1815 | GB_BA1:MTV033 | 21620 | AL021928 | Mycobacterium tuberculosis H37Rv complete genome; segment 11/162. | Mycobacterium | 48,302 | 17-Jun-98 |
| | | | | | | tuberculosis | | |
| | | GB_BA2:MSU10425 | 4261 | U10425 | Mycobacterium smegmatis ferric exochelin uptake proteins FxuB (fxuB), | Mycobacterium | 41,282 | 07-DEC-1994 |
| | | | | | FxuA (fxuA) genes, complete cds, FxuC (fxuC) gene, partial cds, and ferric | smegmatis | | |
| | | | | | exochelin biosynthesis protein FxbA (fxbA) gene, complete cds. | | | |
| | | GB_EST30:AV018477 | 249 | AV018477 | AV018477 Mus musculus 18-day embryo C57BL/6J Mus musculus cDNA | Mus musculus | 42,169 | 28-Aug-99 |
| | | | | | clone 1190005G23, mRNA sequence. | | | |
| rxa02119 | 1764 | GB_BA1:SCARD1GN | 2321 | X84374 | S. capreolus ard1 gene. | Streptomyces capreolus | 49,857 | 23-Aug-95 |
| | | GB_PL2:SPBC29A3 | 42770 | AL022299 | S. pombe chromosome II cosmid c29A3. | Schizosaccharomyces | 37,269 | 02-DEC-1999 |
| | | | | | | pombe | | |
| | | GB_HTG1:CEY47H10 | 296589 | Z95311 | Caenorhabditis elegans chromosome I clone Y47H10, *** SEQUENCING | Caenorhabditis elegans | 34,160 | 7-Sep-99 |
| | | | | | IN PROGRESS ***, in unordered pieces. | | | |
| rxa02200 | 1233 | GB_PR3:HSA494O16 | 50502 | AL117328 | Human DNA sequence from clone 494O16 on chromosome 22, complete | Homo sapiens | 38,648 | 23-Nov-99 |
| | | | | | sequence. | | | |
| | | GB_HTG2:AC008161 | 158440 | AC008161 | Mus musculus clone 182_H_5 *** SEQUENCING IN PROGRESS ***, 29 | Mus musculus | 35,938 | 28-Jul-99 |
| | | | | | unordered pieces. | | | |
| | | GB_HTG2:AC008161 | 158440 | AC008161 | Mus musculus clone 182_H_5, *** SEQUENCING IN PROGRESS ***, 29 | Mus musculus | 35,938 | 28-Jul-99 |
| | | | | | unordered pieces. | | | |
| rxa02222 | | | | | | | | |
| rxa02312 | 1482 | GB_BA1:ECOUW93 | 338534 | U14003 | Escherichia coli K-12 chromosomal region from 92.8 to 00.1 minutes. | Escherichia coli | 60,729 | 17-Apr-96 |
| | | GB_BA2:AE000492 | 10181 | AE000492 | Escherichia coli K-12 MG1655 section 382 of 400 of the complete genome. | Escherichia coli | 60,729 | 12-Nov-98 |
| | | GB_BA1:BSUB0004 | 213190 | Z99107 | Bacillus subtilis complete genome (section 4 of 21): from 600701 to | Bacillus subtilis | 35,670 | 26-Nov-97 |
| | | | | | 813890. | | | |
| rxa02313 | 1344 | GB_EST30:AV013722 | 344 | AV013722 | AV013722 Mus musculus 18-day embryo C57BL/6J Mus musculus cDNA | Mus musculus | 39,941 | 25-Aug-99 |
| | | | | | clone 1110049L02, mRNA sequence. | | | |
| | | GB_EST29:AI596306 | 356 | AI596306 | ve20b05.y1 Soares mouse NbMH Mus musculus cDNA clone | Mus musculus | 40,395 | 21-Apr-99 |
| | | | | | IMAGE: 818673 5′, mRNA sequence. | | | |
| | | GB_EST29:AI595357 | 335 | AI595357 | ve20b05.x1 Soares mouse NbMH Mus musculus cDNA clone | Mus musculus | 35,821 | 21-Apr-99 |
| | | | | | IMAGE: 818673 3′, mRNA sequence. | | | |
| rxa02348 | | | | | | | | |
| rxa02353 | 491 | GB_BA2:AF175299 | 8140 | AF175299 | Sinorhizobium meliloti ThuR (thuR), ThuE (thuE), ThuF (thuF), ThuG | Sinorhizobium meliloti | 51,674 | 30-Aug-99 |
| | | | | | (thuG), ThuK (thuK), ThuA (thuA), and ThuB (thuB) genes, complete cds. | | | |
| | | GB_HTG3:AC008675 | 206439 | AC008675 | Homo sapiens chromosome 5 clone CIT978SKB_45I8 *** SEQUENCING | Homo sapiens | 38,351 | 3-Aug-99 |
| | | | | | IN PROGRESS ***, 43 unordered pieces. | | | |
| | | GB_HTG3:AC008672 | 131573 | AC008672 | Homo sapiens chromosome 5 clone CIT978SKB_3B12, *** SEQUENCING | Homo sapiens | 40,289 | 3-Aug-99 |
| | | | | | IN PROGRESS ***, 71 unordered pieces. | | | |
| rxa02354 | 957 | GB_PR3:HS357K22 | 145638 | AL022720 | Human DNA sequence from clone 357K22 on chromosome Xq27.1-27.3 | Homo sapiens | 34,926 | 23-Nov-99 |
| | | | | | Contains EST, STS, GSS, complete sequence. | | | |
| | | GB_IN1:D87738 | 1849 | D87738 | Branchiostoma belcheri mRNA for cytoplasmic actin BbCA1, complete cds. | Branchiostoma belcheri | 39,788 | 2-Apr-99 |
| | | GB_IN1:PIOACTA | 4172 | M26501 | Starfish (P. ochraceus) cytoplasmic actin gene, complete cds. | Pisaster ochraceus | 40,178 | 26-Apr-93 |
| rxa02394 | 1434 | GB_HTG5:AC007521 | 173897 | AC007521 | Drosophila melanogaster chromosome X clone BACR49A04 (D698) RPCI- | Drosophila | 34,954 | 17-Nov-99 |
| | | | | | 98 49.A.4 map 10A2-10B2 strain y; cn bw sp, *** SEQUENCING IN | melanogaster | | |
| | | | | | PROGRESS ***, 56 unordered pieces. | | | |
| | | GB_HTG3:AC010357 | 302201 | AC010357 | Homo sapiens chromosome 5 clone CITB-H1_2030B19, *** | Homo sapiens | 38,411 | 15-Sep-99 |
| | | | | | SEQUENCING IN PROGRESS ***, 12 unordered pieces. | | | |
| | | GB_HTG3:AC010357 | 302201 | AC010357 | Homo sapiens chromosome 5 clone CITB-H1_2030B19, *** | Homo sapiens | 38,411 | 15-Sep-99 |
| | | | | | SEQUENCING IN PROGRESS ***, 12 unordered pieces. | | | |
| rxa02438 | 882 | GB_BA1:SC7B7 | 13800 | AL009199 | Streptomyces coelicolor cosmid 7B7. | Streptomyces coelicolor | 53,592 | 02-DEC-1997 |
| | | GB_BA1:SC3F9 | 19830 | AL023862 | Streptomyces coelicolor cosmid 3F9. | Streptomyces coelicolor | 47,166 | 10-Feb-99 |
| | | GB_BA1:SCF43A | 35437 | AL096837 | Streptomyces coelicolor cosmid F43A. | Streptomyces coelicolor | 44,987 | 13-Jul-99 |
| | | | | | | A3(2) | | |
| rxa02439 | 1146 | GB_PAT:E16763 | 2517 | E16763 | gDNA encoding aspartate transferase (AAT). | Corynebacterium | 39,600 | 28-Jul-99 |
| | | | | | | glutamicum | | |
| | | GB_HTG1:HSDJ753D5 | 184025 | AL049693 | Homo sapiens chromosome 6 clone RP4-753D5, *** SEQUENCING IN | Homo sapiens | 36,894 | 23-Nov-99 |
| | | | | | PROGRESS ***, in unordered pieces. | | | |
| | | GB_HTG1:HSDJ753D5 | 184025 | AL049693 | Homo sapiens chromosome 6 clone RP4-753D5, *** SEQUENCING IN | Homo sapiens | 36,894 | 23-Nov-99 |
| | | | | | PROGRESS ***, in unordered pieces. | | | |
| rxa02441 | 780 | GB_EST7:W61724 | 312 | W61724 | md66b02.r1 Soares mouse embryo NbME13.5 14.5 Mus musculus cDNA | Mus musculus | 42,308 | 7-Jun-96 |
| | | | | | clone IMAGE: 373323 5′ similar to gb: L23769 Mouse microfibril-associated | | | |
| | | | | | glycoprotein (MOUSE);, mRNA sequence. | | | |
| | | GB_PR4:AC008115 | 158431 | AC008115 | Homo sapiens 12p12-27.2-31.7 BAC RPCI11-180M15 (Roswell Park | Homo sapiens | 37,286 | 09-OCT-1999 |
| | | | | | Cancer Institute Human BAC Library) complete sequence. | | | |
| | | GB_EST29:AI622043 | 586 | AI622043 | 486032B05.x2 486 - leaf primordia cDNA library from Hake lab Zea mays | Zea mays | 36,364 | 22-Apr-99 |
| | | | | | cDNA, mRNA sequence. | | | |
| rxa02442 | 972 | GB_PR4:AC007870 | 134757 | AC007870 | Genomic sequence for Homo sapiens clone 4P6, complete sequence. | Homo sapiens | 37,110 | 12-Aug-99 |
| | | GB_PR4:AC007870 | 134757 | AC007870 | Genomic sequence for Homo sapiens clone 4P6, complete sequence. | Homo sapiens | 34,941 | 12-Aug-99 |
| | | GB_PAT:AR053765 | 4624 | AR053765 | Sequence 5 from U.S. Pat. No. 5834263. | Unknown. | 38,988 | 29-Sep-99 |
| rxa02447 | 1118 | GB_EST36:AI881490 | 551 | AI881490 | 606069G06.y1 606 - Ear tissue cDNA library from Schmidt lab Zea mays | Zea mays | 49,534 | 21-Jul-99 |
| | | | | | cDNA, mRNA sequence. | | | |
| | | GB_PL1:CKRNAHUP3 | 1605 | X75440 | C. kessleri HUP3 mRNA. | Chlorella kessleri | 42,935 | 28-Jun-95 |
| | | GB_PL1:CKHUP1 | 2481 | Y07520 | Chlorella kessleri HUP1 mRNA for H(+)/hexose cotransporter. | Chlorella kessleri | 43,379 | 12-Sep-93 |
| rxa02451 | 1647 | GB_BA1:BRLBIOAD | 2272 | D14083 | Brevibacterium flavum genes for 7,8-diaminopelargonic acid | Corynebacterium | 40,496 | 3-Feb-99 |
| | | | | | aminotransferase and dethiobiotin synthetase, complete cds. | glutamicum | | |
| | | GB_PAT:E08643 | 285 | E08643 | Base sequence having the promoter function in Corynebacterium | Corynebacterium | 37,193 | 29-Sep-97 |
| | | | | | microorganisms. | glutamicum | | |
| | | GB_PL2:EFI245745 | 3194 | AJ245745 | Endomyces fibuliger ura3 gene for orotidine-5′-phosphate decarboxylase. | Saccharomycopsis | 38,889 | 24-Aug-99 |
| | | | | | | fibuligera | | |
| rxa02491 | 1377 | GB_BA1:MTCY20G9 | 37218 | Z77162 | Mycobacterium tuberculosis H37Rv complete genome; segment 25/162. | Mycobacterium | 55,745 | 17-Jun-98 |
| | | | | | | tuberculosis | | |
| | | GB_BA1:CGLEUA | 3492 | X70959 | C. glutamicum gene leuA for isopropylmalate synthase. | Corynebacterium | 38,253 | 10-Feb-99 |
| | | | | | | glutamicum | | |
| | | GB_PR3:AC004764 | 68048 | AC004764 | Homo sapiens chromosome 5, P1 clone 255g5 (LBNL H61), complete | Homo sapiens | 34,821 | 29-MAY-1998 |
| | | | | | sequence. | | | |
| rxa02507 | 1524 | GB_PR4:AC000134 | 203300 | AC000134 | Homo sapiens Chromosome 11q13 BAC Clone 137c7, complete sequence. | Homo sapiens | 37,087 | 06-MAY-1999 |
| | | GB_PR2:HS227L5 | 85304 | AL031585 | Human DNA sequence from clone 227L5 on chromosome Xp11.22-11.3. | Homo sapiens | 38,718 | 23-Nov-99 |
| | | | | | Contains a Keratin, Type 1 Cytoskeletal 18 (KRT18, CYK18, K18, CK18) | | | |
| | | | | | pseudogene and an STS, complete sequence. | | | |
| | | GB_PR4:AC000134 | 203300 | AC000134 | Homo sapiens Chromosome 11q13 BAC Clone 137c7, complete sequence. | Homo sapiens | 35,955 | 06-MAY-1999 |
| rxa02515 | 879 | GB_BA1:SCC22 | 22115 | AL096839 | Streptomyces coelicolor cosmid C22. | Streptomyces coelicolor | 36,219 | 12-Jul-99 |
| | | GB_BA1:MTV007 | 32806 | AL021184 | Mycobacterium tuberculosis H37Rv complete genome; segment 64/162. | Mycobacterium | 63,026 | 17-Jun-98 |
| | | | | | | tuberculosis | | |
| | | GB_BA1:MLCL536 | 36224 | Z99125 | Mycobacterium leprae cosmid L536. | Mycobacterium leprae | 36,468 | 04-DEC-1998 |
| rxa02562 | 843 | GB_HTG7:AC011197 | 167967 | AC011197 | Homo sapiens clone RP11-322C8, *** SEQUENCING IN PROGRESS ***, | Homo sapiens | 36,675 | 08-DEC-1999 |
| | | | | | 19 unordered pieces. | | | |
| | | GB_PAT:AR008238 | 6553 | AR008238 | Sequence 1 from U.S. Pat. No. 5753442. | Unknown. | 39,251 | 04-DEC-1998 |
| | | GB_GSS4:AQ712494 | 469 | AQ712494 | HS_2137_A1_A12_T7C CIT Approved Human Genomic Sperm Library D | Homo sapiens | 35,664 | 13-Jul-99 |
| | | | | | Homo sapiens genomic clone Plate = 2137 Col = 23 Row = A, genomic survey | | | |
| | | | | | sequence. | | | |
| rxa02595 | 1287 | GB_BA1:MSGB983CS | 36788 | L78828 | Mycobacterium leprae cosmid B983 DNA sequence. | Mycobacterium leprae | 39,905 | 15-Jun-96 |
| | | GB_BA1:MLCB1883 | 43505 | AL022486 | Mycobacterium leprae cosmid B1883. | Mycobacterium leprae | 52,909 | 27-Aug-99 |
| | | GB_GSS1:CNS0056G | 994 | AL057090 | Drosophila melanogaster genome survey sequence T7 end of BAC # | Drosophila | 31,315 | 3-Jun-99 |
| | | | | | BACR11M23 of RPCI-98 library from Drosophila melanogaster (fruit fly), | melanogaster | | |
| | | | | | genomic survey sequence. | | | |
| rxa02597 | | | | | | | | |
| rxa02605 | 618 | GB_BA1:MXENO201 | 390 | X92571 | M. xenopi gene for 32 kDa protein (partial). | Mycobacterium xenopi | 55,738 | 15-Jan-98 |
| | | GB_BA1:MXENO201 | 390 | X92571 | M. xenopi gene for 32 kDa protein (partial). | Mycobacterium xenopi | 59,233 | 15-Jan-98 |
| rxa02614 | 852 | GB_BA1:SCH35 | 45396 | AL078610 | Streptomyces coelicolor cosmid H35. | Streptomyces coelicolor | 50,976 | 4-Jun-99 |
| | | GB_BA2:AF126201 | 12402 | AF126201 | Pseudomonas putida strain S-313 sulfate ester desulfurization gene locus, | Pseudomonas putida | 46,763 | 12-OCT-1999 |
| | | | | | complete sequence. | | | |
| | | GB_BA1:SC8B7 | 14634 | AL031225 | Streptomyces coelicolor cosmid 8B7. | Streptomyces coelicolor | 38,026 | 7-Aug-98 |
| rxa02616 | 834 | GB_BA1:SCD78 | 36224 | AL034355 | Streptomyces coelicolor cosmid D78. | Streptomyces coelicolor | 43,705 | 26-Nov-98 |
| | | GB_EST28:AI509984 | 534 | AI509984 | mj18e06.y1 Soares mouse embryo NbME13.5 14.5 Mus musculus cDNA | Mus musculus | 38,653 | 12-MAR-1999 |
| | | | | | clone IMAGE: 476482 5′, mRNA sequence. | | | |
| | | GB_EST8:AA050633 | 522 | AA050633 | mj18e06.r1 Soares mouse embryo NbME13.5 14.5 Mus musculus cDNA | Mus musculus | 41,602 | 9-Sep-96 |
| | | | | | clone IMAGE: 476482 5′, mRNA sequence. | | | |
| rxa02627 | 866 | GB_GSS6:AQ826046 | 427 | AQ826046 | HS_5311_B2_B01_SP6E RPCI-11 Human Male BAC Library Homo | Homo sapiens | 38,095 | 27-Aug-99 |
| | | | | | sapiens genomic clone Plate = 887 Col = 2 Row = D, genomic survey | | | |
| | | | | | sequence. | | | |
| | | GB_PR2:HS329F2 | 24753 | AL031710 | Human DNA sequence from clone LA16-329F2 on chromosome 16, | Homo sapiens | 38,580 | 22-Nov-99 |
| | | | | | complete sequence. | | | |
| | | GB_GSS10:AQ255771 | 621 | AQ255771 | nbxb0014E22r CUGI Rice BAC Library Oryza sativa genomic clone | Oryza sativa | 34,622 | 23-OCT-1998 |
| | | | | | nbxb0014E22r, genomic survey sequence. | | | |
| rxa02628 | 528 | GB_BA1:RCAHIMA | 5403 | M84030 | Rhodobacter capsulatus integration host factor (himA) gene, complete cds. | Rhodobacter capsulatus | 37,452 | 26-Apr-93 |
| | | GB_GSS13:AQ476201 | 312 | AQ476201 | CITBI-E1-2592P3.TF CITBI-E1 Homo sapiens genomic clone 2592P3, | Homo sapiens | 43,182 | 23-Apr-99 |
| | | | | | genomic survey sequence. | | | |
| | | GB_EST38:AW054154 | 648 | AW054154 | 614079C04.x1 614 - root cDNA library from Walbot Lab Zea mays cDNA, | Zea mays | 37,657 | 21-Sep-99 |
| | | | | | mRNA sequence. | | | |
| rxa02650 | 702 | GB_EST19:AA803900 | 441 | AA803900 | GM14564.5prime GM Drosophila melanogaster ovary pOT2 Drosophila | Drosophila | 40,394 | 25-Nov-98 |
| | | | | | melanogaster cDNA clone GM14564 5prime, mRNA sequence. | melanogaster | | |
| | | GB_EST19:AA803900 | 441 | AA803900 | GM14564.5prime GM Drosophila melanogaster ovary pOT2 Drosophila | Drosophila | 37,757 | 25-Nov-98 |
| | | | | | melanogaster cDNA clone GM14564 5prime, mRNA sequence. | melanogaster | | |
| rxa02660 | 762 | GB_PR3:HS308O1 | 166715 | Z93403 | Human genomic DNA sequence from clone 308O1 on chromosome Xp11.3-11.4. | Homo sapiens | 33,912 | 23-Nov-99 |
| | | | | | Contains EST, CA repeat, STS, GSS, CpG island. | | | |
| | | GB_PR3:AC003669 | 159446 | AC003669 | Homo sapiens Xp22 BAC GS-594A7 (Genome Systems Human BAC | Homo sapiens | 35,734 | 24-MAR-1998 |
| | | | | | library) contains Bmx gene, complete sequence. | | | |
| | | GB_HTG3:AC010923 | 152021 | AC010923 | Drosophila melanogaster chromosome X clone BACR19K15 (D897) RPCI- | Drosophila | 28,070 | 08-OCT-1999 |
| | | | | | 98 19.K.15 map 15B-15E strain y; cn bw sp, *** SEQUENCING IN | melanogaster | | |
| | | | | | PROGRESS ***, 175 unordered pieces. | | | |
| rxa02661 | 342 | GB_HTG2:AC007802 | 118569 | AC007802 | Drosophila melanogaster chromosome 2 clone BACR07I11 (D648) RPCI- | Drosophila | 43,373 | 2-Aug-99 |
| | | | | | 98 07.I.11 map 58A1-58A2 strain y; cn bw sp, *** SEQUENCING IN | melanogaster | | |
| | | | | | PROGRESS ***, 70 unordered pieces. | | | |
| | | GB_HTG2:AC007802 | 118569 | AC007802 | Drosophila melanogaster chromosome 2 clone BACR07I11 (D648) RPCI- | Drosophila | 43,373 | 2-Aug-99 |
| | | | | | 98 07.I.11 map 58A1-58A2 strain y; cn bw sp, *** SEQUENCING IN | melanogaster | | |
| | | | | | PROGRESS ***, 70 unordered pieces. | | | |
| | | GB_EST2:R04660 | 288 | R04660 | pk27b04.r1 Kuwabara Mixed stage C. briggsae Caenorhabditis briggsae | Caenorhabditis | 47,009 | 31-MAR-1995 |
| | | | | | cDNA, mRNA sequence. | briggsae | | |
| rxa02663 | 1518 | GB_BA1:SC9F2 | 11908 | AL035559 | Streptomyces coelicolor cosmid 9F2. | Streptomyces coelicolor | 45,964 | 25-Feb-99 |
| | | GB_BA1:MTCY50 | 36030 | Z77137 | Mycobacterium tuberculosis H37Rv complete genome; segment 55/162. | Mycobacterium | 38,998 | 17-Jun-98 |
| | | | | | | tuberculosis | | |
| | | GB_BA1:D90721 | 16578 | D90721 | Escherichia coli genomic DNA. (18.6-19.0 min). | Escherichia coli | 44,325 | 7-Feb-99 |
| rxa02664 | 783 | GB_BA2:U32798 | 10423 | U32798 | Haemophilus influenzae Rd section 113 of 163 of the complete genome. | Haemophilus influenzae | 39,868 | 29-MAY-1998 |
| | | | | | | Rd | | |
| | | GB_BA1:HIU17295 | 9424 | U17295 | Haemophilus influenzae dppB, dppC, dppD, dppF, isn, artP, artl/J, artQ, | Haemophilus influenzae | 49,298 | 4-Apr-96 |
| | | | | | and artM genes, complete cds, and opa gene, partial cds. | | | |
| | | GB_BA2:U32792 | 11306 | U32792 | Haemophilus influenzae Rd section 107 of 163 of the complete genome. | Haemophilus influenzae | 39,764 | 29-MAY-1998 |
| | | | | | | Rd | | |
| rxa02684 | 987 | GB_PR2:CNS00006 | 181433 | AL049775 | Human chromosome 14 DNA sequence *** IN PROGRESS *** BAC R- | Homo sapiens | 36,961 | 17-Jun-99 |
| | | | | | 497E19 of RPCI-11 library from chromosome 14 of Homo sapiens | | | |
| | | | | | (Human), complete sequence. | | | |
| | | GB_HTG3:AC009857 | 148241 | AC009857 | Homo sapiens clone 2_F_6, *** SEQUENCING IN PROGRESS ***, 9 | Homo sapiens | 35,380 | 3-Sep-99 |
| | | | | | unordered pieces. | | | |
| | | GB_HTG3:AC009857 | 148241 | AC009857 | Homo sapiens clone 2_F_6, *** SEQUENCING IN PROGRESS ***, 9 | Homo sapiens | 35,380 | 3-Sep-99 |
| | | | | | unordered pieces. | | | |
| rxa02728 | 936 | GB_BA1:YEHEMSTUV | 3901 | X77867 | Y. enterocolitica hemS, hemT, hemU and hemV genes. | Yersinia enterocolitica | 48,253 | 11-OCT-1996 |
| | | GB_BA1:ECOUW76 | 225419 | U00039 | E. coli chromosomal region from 76.0 to 81.5 minutes. | Escherichia coli | 39,177 | 7-Nov-96 |
| | | GB_HTG3:AC008616 | 112626 | AC008616 | Homo sapiens chromosome 19 clone CIT978SKB_144D21, *** | Homo sapiens | 41,741 | 3-Sep-99 |
| | | | | | SEQUENCING IN PROGRESS ***, 49 unordered pieces. | | | |
| rxa02750 | 939 | GB_GSS15:AQ663436 | 430 | AQ663436 | HS_2160_B2_F10_T7C CIT Approved Human Genomic Sperm Library D | Homo sapiens | 42,020 | 23-Jun-99 |
| | | | | | Homo sapiens genomic clone Plate = 2160 Co = 20 Row = L, genomic survey | | | |
| | | | | | sequence. | | | |
| | | GB_GSS15:AQ663436 | 430 | AQ663436 | HS_2160_B2_F10_T7C CIT Approved Human Genomic Sperm Library D | Homo sapiens | 39,161 | 23-Jun-99 |
| | | | | | Homo sapiens genomic clone Plate = 2160 Col = 20 Row = L, genomic survey | | | |
| | | | | | sequence. | | | |
| rxa02795 | 1560 | GB_HTG5:AC011134 | 192982 | AC011134 | Homo sapiens clone 1_A_23, *** SEQUENCING IN PROGRESS ***, 22 | Homo sapiens | 35,630 | 5-Nov-99 |
| | | | | | unordered pieces. | | | |
| | | GB_HTG5:AC011134 | 192982 | AC011134 | Homo sapiens clone 1_A_23, *** SEQUENCING IN PROGRESS ***, 22 | Homo sapiens | 34,643 | 5-Nov-99 |
| | | | | | unordered pieces. | | | |
| | | GB_BA1:MTCY50 | 36030 | Z77137 | Mycobacterium tuberculosis H37Rv complete genome; segment 55/162. | Mycobacterium | 39,934 | 17-Jun-98 |
| | | | | | | tuberculosis | | |
| rxa02808 | 281 | GB_PR4:AC004897 | 90731 | AC004897 | Homo sapiens PAC clone DJ0811N16 from 7q34-q36, complete sequence. | Homo sapiens | 42,804 | 19-Aug-99 |
| | | GB_RO:AC002121 | 84056 | AC002121 | Genomic sequence from Mouse 11, complete sequence. | Mus musculus | 39,130 | 10-Jul-97 |
| | | GB_PR4:AC005078 | 73231 | AC005078 | Homo sapiens BAC clone RG252K19 from 7p15.2-p21, complete | Homo sapiens | 37,175 | 18-MAR-1999 |
| | | | | | sequence. | | | |
| rxs03220 | 725 | GB_PL1:CKHUP2 | 2353 | X66855 | C. kessleri HUP2 mRNA. | Chlorella kessleri | 45,328 | 17-Feb-97 |
| | | GB_EST38:AW048153 | 383 | AW048153 | UI-M-BH1-alq-h-05-0-UI.s1 NIH_BMAP_M_S2 Mus musculus cDNA clone | Mus musculus | 41,758 | 18-Sep-99 |
| | | | | | UI-M-BH1-alq-h-05-0-UI 3′, mRNA sequence. | | | |
| | | GB_PL1:CKHUP2 | 2353 | X66855 | C. kessleri HUP2 mRNA. | Chlorella kessleri | 38,106 | 17-Feb-97 |
| rxs03221 | 776 | GB_BA1:BSUB0010 | 233780 | Z99113 | Bacillus subtilis complete genome (section 10 of 21): from 1781201 | Bacillus subtilis | 52,282 | 28-Nov-97 |
| | | | | | to 2014980. | | | |
| | | GB_BA1:BSU66480 | 26114 | U66480 | Bacillus subtilis SpoVK (spoVK), YnbA (ynbA), YnbB (ynbB), GlnR | Bacillus subtilis | 52,282 | 22-Jan-97 |
| | | | | | (glnR), glutamine synthetase (glnA), YnaA (ynaA), YnaB (ynaB), YnaC | | | |
| | | | | | (ynaC), YnaD (ynaD), YnaE (ynaE), YnaF (ynaF), YnaG (ynaG), YnaH | | | |
| | | | | | (ynaH), YnaI (ynaI), YnaJ (ynaJ), xylan beta-1,4-xylosidase (xynB), | | | |
| | | | | | xylose repressor (xyIR), xylose isomerase (xyIA), xylulose kinase | | | |
| | | | | | (xyIB), YncB (yncB), YncC (yncC), YncD (yncD) and YncE (yncE) | | | |
| | | | | | genes, complete cds. | | | |
| | | GB_BA1:BSUB0010 | 233780 | Z99113 | Bacillus subtilis complete genome (section 10 of 21): from 1781201 | Bacillus subtilis | 36,983 | 26-Nov-97 |
| | | | | | to 2014980. | | | |

[0172] TABLE 2
GENES IDENTIFIED FROM GENBANK

| GenBank ™ | | | |
|---|---|---|---|
| Accession | | | |
| No. | Gene Name | Gene Function | Reference |
| A09073 | ppg | Phosphoenol pyruvate carboxylase | Bachmann, B. et al. “DNA fragment coding for phosphoenolpyruvat |
| | | | corboxylase, recombinant DNA carrying said fragment, strains carrying the |
| | | | recombinant DNA and method for producing L-aminino acids using said |
| | | | strains,” Patent: EP 0358940-A 3 Mar. 21, 1990 |
| A45579, | | Threonine dehydratase | Moeckel, B. et al. “Production of L-isoleucine by means of recombinant |
| A4581, | | | micro-organisms with deregulated threonine dehydratase,” Patent: WO |
| A45583, | | | 9519442-A 5 Jul. 20, 1995 |
| A45585 | | | |
| A45587 | | | |
| AB003132 | murC; ftsQ; | | Kobayashi, M. et al. “Cloning, sequencing, and characterization of the ftsZ |
| | ftsZ | | gene from coryneform bacteria,” Biochem. Biophys. Res. Commun., |
| | | | 236(2): 383-388 (1997) |
| AB015023 | murC; ftsQ | | Wachi, M. et al. “A murC gene from Coryneform bacteria,” Appl. Microbiol. |
| | | | Biotechnol., 51(2): 223-228 (1999) |
| AB018530 | dtsR | | Kimura, E. et al. “Molecular cloning of a novel gene, dtsR, which rescues the |
| | | | detergent sensitivity of a mutant derived from Brevibacterium |
| | | | lactofermentum,” Biosci. Biotechnol. Biochem., 60(10): 1565-1570 (1996) |
| AB018531 | dtsR1; dtsR2 | | |
| AB020624 | murI | D-glutamate racemase | |
| AB023377 | tkt | transketolase | |
| AB024708 | gltB; gltD | Glutamine 2-oxoglutarate | |
| | | aminotransferase | |
| | | large and small subunits | |
| AB025424 | acn | aconitase | |
| AB027714 | rep | Replication protein | |
| AB027715 | rep; aad | Replication protein; aminoglycoside | |
| | | adenyltransferase | |
| AF005242 | argC | N-acetylglutamate-5-semialdehyde | |
| | | dehydrogenase | |
| AF005635 | glnA | Glutamine synthetase | |
| AF030405 | hisF | cyclase | |
| AF030520 | argG | Argininosuccinate synthetase | |
| AF031518 | argF | Ornithine carbamolytransferase | |
| AF036932 | aroD | 3-dehydroquinate dehydratase | |
| AF038548 | pyc | Pyruvate carboxylase | |
| AF038651 | dciAE; apt; | Dipeptide-binding protein; adenine | Wehmeier, L. et al. “The role of the Corynebacterium glutamicum rel gene in |
| | rel | phosphoribosyltransferase; GTP | (p)ppGpp metabolism,” Microbiology, 144: 1853-1862 (1998) |
| | | pyrophosphokinase | |
| AF041436 | argR | Arginine repressor | |
| AF045998 | impA | Inositol monophosphate phosphatase | |
| AF048764 | argH | Argininosuccinate lyase | |
| AF049897 | argC; argJ; | N-acetylglutamylphosphate reductase; | |
| | argB; argD; | ornithine acetyltransferase; N- | |
| | argF; argR; | acetylglutamate kinase; acetylornithine | |
| | argG; argH | transminase; ornithine | |
| | | carbamoyltransferase; arginine repressor; | |
| | | argininosuccinate synthase; | |
| | | argininosuccinate lyase | |
| AF050109 | inhA | Enoyl-acyl carrier protein reductase | |
| AF050166 | hisG | ATP phosphoribosyltransferase | |
| AF051846 | hisA | Phosphoribosylformimino-5-amino-1- | |
| | | phosphoribosyl-4-imidazolecarboxamide | |
| | | isomerase | |
| AF052652 | metA | Homoserine O-acetyltransferase | Park, S. et al. “Isolation and analysis of metA, a methionine biosynthetic gene |
| | | | encoding homoserine acetyltransferase in Corynebacterium glutamicum,” Mol. |
| | | | Cells., 8(3): 286-294 (1998) |
| AF053071 | aroB | Dehydroquinate synthetase | |
| AF060558 | hisH | Glutamine amidotransferase | |
| AF086704 | hisE | Phosphoribosyl-ATP- | |
| | | pyrophosphohydrolase | |
| AF114233 | aroA | 5-enolpyruvylshikimate 3-phosphate | |
| | | synthase | |
| AF116184 | panD | L-aspartate-alpha-decarboxylase precursor | Dusch, N. et al. “Expression of the Corynebacterium glutamicum panD gene |
| | | | encoding L-aspartate-alpha-decarboxylase leads to pantothenate |
| | | | overproduction in Escherichia coli,” Appl. Environ. Microbiol., |
| | | | 65(4)1530-1539 (1999) |
| AF124518 | aroD; aroE | 3-dehydroquinase; shikimate | |
| | | dehydrogenase | |
| AF124600 | aroC; aroK; | Chorismate synthase; shikimate kinase; 3- | |
| | aroB; pepQ | dehydroquinate synthase; putative | |
| | | cytoplasmic peptidase | |
| AF145897 | inhA | | |
| AF145898 | inhA | | |
| AJ001436 | ectP | Transport of ectoine, glycine betaine, | Peter, H. et al. “Corynebacterium glutamicum is equipped with four secondary |
| | | proline | carriers for compatible solutes: Identification, sequencing, and characterization |
| | | | of the proline/ectoine uptake system, ProP, and the ectoine/proline/glycine |
| | | | betaine carrier, EctP,” J. Bacteriol., 180(22): 6005-6012 (1998) |
| AJ004934 | dapD | Tetrahydrodipicolinate succinylase | Wehrmann, A. et al. “Different modes of diaminopimelate synthesis and their |
| | | (incompleteⁱ) | role in cell wall integrity: A study with Corynebacterium glutamicum,” J. |
| | | | Bacteriol., 180(12): 3159-3165 (1998) |
| AJ007732 | ppc; secG; | Phosphoenolpyruvate-carboxylase; ?; high | |
| | amt; ocd; | affinity ammonium uptake protein; | |
| | soxA | putative ornithine-cyclodecarboxylase; | |
| | | sarcosine oxidase | |
| AJ010319 | ftsY, glnB, | Involved in cell division; PII protein; | Jakoby, M. et al. “Nitrogen regulation in Corynebacterium glutamicum; |
| | glnD; srp; | uridylyltransferase (uridylyl-removing | Isolation of genes involved in biochemical characterization of corresponding |
| | amtP | enzmye); signal recognition particle; low | proteins,” FEMS Microbiol., 173(2): 303-310 (1999) |
| | | affinity ammonium uptake protien | |
| AJ132968 | cat | Chloramphenicol aceteyl transferase | |
| AJ224946 | mqo | L-malate: quinone oxidoreductase | Molenaar, D. et al. “Biochemical and genetic characterization of the |
| | | | membrane-associated malate dehydrogenase (acceptor) from Corynebacterium |
| | | | glutamicum,” Eur. J. Biochem., 254(2): 395-403 (1998) |
| AJ238250 | ndh | NADH dehydrogenase | |
| AJ238703 | porA | Porin | Lichtinger, T. et al. “Biochemical and biophysical characterization of the cell |
| | | | wall porin of Corynebacterium glutamicum: The channel is formed by a low |
| | | | molecular mass polypeptide,” Biochemistry, 37(43): 15024-15032 (1998) |
| D17429 | | Transposable element IS31831 | Vertes, A. A. et al. “Isolation and characterization of IS31831, a transposable |
| | | | element from Corynebacterium glutamicum,” Mol. Microbiol., 11(4): 739-746 |
| | | | (1994) |
| D84102 | odhA | 2-oxoglutarate dehydrogenase | Usuda, Y. et al. “Molecular cloning of the Corynebacterium glutamicum |
| | | | (Brevibacterium lactofermentum AJ12036) odhA gene encoding a novel type |
| | | | of 2-oxoglutarate dehydrogenase,” Microbiology, 142: 3347-3354 (1996) |
| E01358 | hdh; hk | Homoserine dehydrogenase; homoserine | Katsumata, R. et al. “Production of L-thereonine and L-isoleucine,” Patent: JP |
| | | kinase | 1987232392-A 1 Oct. 12, 1987 |
| E01359 | | Upstream of the start codon of homoserine | Katsumata, R. et al. “Production of L-thereonine and L-isoleucine,” Patent: JP |
| | | kinase gene | 1987232392-A 2 Oct. 12, 1987 |
| E01375 | | Tryptophan operon | |
| E01376 | trpL; trpE | Leader peptide; anthranilate synthase | Matsui, K. et al. “Tryptophan operon, peptide and protein coded thereby, |
| | | | utilization of tryptophan operon gene expression and production of |
| | | | tryptophan,” Patent: JP 1987244382-A 1 Oct. 24, 1987 |
| E01377 | | Promoter and operator regions of | Matsui, K. et al. “Tryptophan operon, peptide and protein coded thereby, |
| | | tryptophan operon | utilization of tryptophan operon gene expression and production of |
| | | | tryptophan,” Patent: JP 1987244382-A 1 Oct. 24, 1987 |
| E03937 | | Biotin-synthase | Hatakeyama, K. et al. “DNA fragment containing gene capable of coding |
| | | | biotin synthetase and its utilization,” Patent: JP 1992278088-A 1 Oct. 02, 1992 |
| E04040 | | Diamino pelargonic acid aminotransferase | Kohama, K. et al. ”Gene coding diaminopelargonic acid aminotransferase and |
| | | | desthiobiotin synthetase and its utilization,” Patent: JP 1992330284-A 1 |
| | | | Nov. 18, 1992 |
| E04041 | | Desthiobiotinsynthetase | Kohama, K. et al. “Gene coding diaminopelargonic acid aminotransferase and |
| | | | desthiobiotin synthetase and its utilization,” Patent: JP 1992330284-A 1 |
| | | | Nov. 18, 1992 |
| E04307 | | Flavum aspartase | Kurusu, Y. et al. “Gene DNA coding aspartase and utilization thereof,” Patent: |
| | | | JP 1993030977-A 1 Feb. 09, 1993 |
| E04376 | | Isocitric acid lyase | Katsumata, R. et al. “Gene manifestation controlling DNA,” Patent: JP |
| | | | 1993056782-A 3 Mar. 09, 1993 |
| E04377 | | Isocitric acid lyase N-terminal fragment | Katsumata, R. et al. “Gene manifestation controlling DNA,” Patent: JP |
| | | | 1993056782-A 3 Mar. 09, 1993 |
| E04484 | | Prephenate dehydratase | Sotouchi, N. et al. “Production of L-phenylalanine by fermentation,” Patent: JP |
| | | | 1993076352-A 2 Mar. 30, 1993 |
| E05108 | | Aspartokinase | Fugono, N. et al. “Gene DNA coding Aspartokinase and its use,” Patent: JP |
| | | | 1993184366-A 1 Jul. 27, 1993 |
| E05112 | | Dihydro-dipichorinate synthetase | Hatakeyama, K. et al. “Gene DNA coding dihydrodipicolinic acid synthetase |
| | | | and its use,” Patent: JP 1993184371-A 1 Jul. 27, 1993 |
| E05776 | | Diaminopimelic acid dehydrogenase | Kobayashi, M. et al. “Gene DNA coding Diaminopimelic acid dehydrogenase |
| | | | and its use,” Patent: JP 1993284970-A 1 Nov. 02, 1993 |
| E05779 | | Threonine synthase | Kohama, K. et al. “Gene DNA coding threonine synthase and its use,” Patent: |
| | | | JP 1993284972-A 1 Nov. 02, 1993 |
| E06110 | | Prephenate dehydratase | Kikuchi, T. et al. “Production of L-phenylalanine by fermentation method,” |
| | | | Patent: JP 1993344881-A 1 Dec. 27, 1993 |
| E06111 | | Mutated Prephenate dehydratase | Kikuchi, T. et al. “Production of L-phenylalanine by fermentation method,” |
| | | | Patent: JP 1993344881-A 1 Dec. 27, 1993 |
| E06146 | | Acetohydroxy acid synthetase | Inui, M. et al. “Gene capable of coding Acetohydroxy acid synthetase and its |
| | | | use,” Patent: JP 1993344893-A 1 Dec. 27, 1993 |
| E06825 | | Aspartokinase | Sugimoto, M. et al. “Mutant aspartokinase gene,” patent: JP 1994062866-A 1 |
| | | | Mar. 08, 1994 |
| E06826 | | Mutated aspartokinase alpha subunit | Sugimoto, M. et al. “Mutant aspartokinase gene,” patent: JP 1994062866-A 1 |
| | | | Mar. 08, 1994 |
| E06827 | | Mutated aspartokinase alpha subunit | Sugimoto, M. et al. “Mutant aspartokinase gene,” patent: JP 1994062866-A 1 |
| | | | Mar. 08, 1994 |
| E07701 | secY | | Honno, N. et al. “Gene DNA participating in integration of membraneous |
| | | | protein to membrane,” Patent: JP 1994169780-A 1 Jun. 21, 1994 |
| E08177 | | Aspartokinase | Sato, Y. et al. “Genetic DNA capable of coding Aspartokinase released from |
| | | | feedback inhibition and its utilization,” Patent: JP 1994261766-A 1 |
| | | | Sep. 20, 1994 |
| E08178, | | Feedback inhibition-released | Sato, Y. et al. “Genetic DNA capable of coding Aspartokinase released from |
| E08179, | | Aspartokinase | feedback inhibition and its utilization,” Patent: JP 1994261766-A 1 |
| E08180, | | | Sep. 20, 1994 |
| E08181, | | | |
| E08182 | | | |
| E08232 | | Acetohydroxy-acid isomeroreductase | Inui, M. et al. “Gene DNA coding acetohydroxy acid isomeroreductase,” |
| | | | Patent: JP 1994277067-A 1 Oct. 04, 1994 |
| E08234 | secE | | Asai, Y. et al. “Gene DNA coding for translocation machinery of protein,” |
| | | | Patent: JP 1994277073-A 1 Oct. 04, 1994 |
| E08643 | | FT aminotransferase and desthiobiotin | Hatakeyama, K. et al. “DNA fragment having promoter function in |
| | | synthetase promoter region | coryneform bacterium,” Patent: JP 1995031476-A 1 Feb. 03, 1995 |
| E08646 | | Biotin synthetase | Hatakeyama, K. et al. “DNA fragment having promoter function in |
| | | | coryneform bacterium,” Patent: JP 1995031476-A 1 Feb. 03, 1995 |
| E08649 | | Aspartase | Kohama, K. et al “DNA fragment having promoter function in coryneform |
| | | | bacterium,” Patent: JP 1995031478-A 1 Feb. 03, 1995 |
| E08900 | | Dihydrodipicolinate reductase | Madori, M. et al. “DNA fragment containing gene coding Dihydrodipicolinate |
| | | | acid reductase and utilization thereof,” Patent: JP 1995075578-A 1 |
| | | | Mar. 20, 1995 |
| E08901 | | Diaminopimelic acid decarboxylase | Madori, M. et al. “DNA fragment containing gene coding Diaminopimelic acid |
| | | | decarboxylase and utilization thereof,” Patent: JP 1995075579-A 1 |
| | | | Mar. 20, 1995 |
| E12594 | | Serine hydroxymethyltransferase | Hatakeyama, K. et al. “Production of L-trypophan,” Patent: JP 1997028391-A |
| | | | 1 Feb. 04, 1997 |
| E12760, | | transposase | Moriya, M. et al. “Amplification of gene using artificial transposon,” Patent: |
| E12759, | | | JP 1997070291-A Mar. 18, 1997 |
| E12758 | | | |
| E12764 | | Arginyl-tRNA synthetase; diaminopimelic | Moriya, M. et al. “Amplification of gene using artificial transposon,” Patent: |
| | | acid decarboxylase | JP 1997070291-A Mar. 18, 1997 |
| E12767 | | Dihydrodipicolinic acid synthetase | Moriya, M. et al. “Amplification of gene using artificial transposon,” Patent: |
| | | | JP 1997070291-A Mar. 18, 1997 |
| E12770 | | aspartokinase | Moriya, M. et al. “Amplification of gene using artificial transposon,” Patent: |
| | | | JP 1997070291-A Mar. 18, 1997 |
| E12773 | | Dihydrodipicolinic acid reductase | Moriya, M. et al. “Amplification of gene using artificial transposon,” Patent: |
| | | | JP 1997070291-A Mar. 18, 1997 |
| E13655 | | Glucose-6-phosphate dehydrogenase | Hatakeyama, K. et al. “Glucose-6-phosphate dehydrogenase and DNA capable |
| | | | of coding the same,” Patent: JP 1997224661-A 1 Sep. 02, 1997 |
| L01508 | IlvA | Threonine dehydratase | Moeckel, B. et al. “Functional and structural analysis of the threonine |
| | | | dehydratase of Corynebacterium glutamicum,” J. Bacteriol., 174: 8065-8072 |
| | | | (1992) |
| L07603 | EC 4.2.1.15 | 3-deoxy-D-arabinoheptulosonate-7- | Chen, C. et al. “The cloning and nucleotide sequence of Corynebacterium |
| | | phosphate synthase | glutamicum 3-deoxy-D-arabinoheptulosonate-7-phosphate synthase gene,” |
| | | | FEMS Microbiol. Lett., 107: 223-230 (1993) |
| L09232 | IlvB; ilvN; | Acetohydroxy acid synthase large subunit; | Keilhauer, C. et al. “Isoleucine synthesis in Corynebacterium glutamicum: |
| | ilvC | Acetohydroxy acid synthase small subunit; | molecular analysis of the ilvB-ilvN-ilvC operon,” J. Bacteriol., 175(17): |
| | | Acetohydroxy acid isomeroreductase | 5595-5603 (1993) |
| L18874 | PtsM | Phosphoenolpyruvate sugar | Fouet, A et al. “Bacillus subtilis sucrose-specific enzyme II of the |
| | | phosphotransferase | phosphotransferase system: expression in Escherichia coli and homology to |
| | | | enzymes II from enteric bacteria,” PNAS USA, 84(24): 8773-8777 (1987); |
| | | | Lee, J. K. et al. “Nucleotide sequence of the gene encoding the |
| | | | Corynebacterium glutamicum mannose enzyme II and analyses of the deduced |
| | | | protein sequence,” FEMS Microbiol. Lett., 119(1-2): 137-145 (1994) |
| L27123 | aceB | Malate synthase | Lee, H-S. et al. “Molecular characterization of aceB, a gene encoding malate |
| | | | synthase in Corynebacterium glutamicum,” J. Microbiol. Biotechnol., |
| | | | 4(4): 256-263 (1994) |
| L27126 | | Pyruvate kinase | Jetten, M. S. et al. “Structural and functional analysis of pyruvate kinase from |
| | | | Corynebacterium glutamicum,” Appl. Environ. Microbiol., 60(7): 2501-2507 |
| | | | (1994) |
| L28760 | aceA | Isocitrate lyase | |
| L35906 | dtxr | Diphtheria toxin repressor | Oguiza, J. A. et al. “Molecular cloning, DNA sequence analysis, and |
| | | | characterization of the Corynebacterium diphtheriae dtxR from Brevibacterium |
| | | | lactofermentum,” J. Bacteriol., 177(2): 465-467 (1995) |
| M13774 | | Prephenate dehydratase | Follettie, M. T. et al. “Molecular cloning and nucleotide sequence of the |
| | | | Corynebacterium glutamicum pheA gene,” J. Bacteriol., 167: 695-702 (1986) |
| M16175 | 5S rRNA | | Park, Y-H. et al. “Phylogenetic analysis of the coryneform bacteria by 56 |
| | | | rRNA sequences,” J. Bacteriol., 169: 1801-1806 (1987) |
| M16663 | trpE | Anthranilate synthase, 5′ end | Sano, K. et al. “Structure and function of the trp operon control regions of |
| | | | Brevibacterium lactofermentum, a glutamic-acid-producing bacterium,” Gene, |
| | | | 52: 191-200 (1987) |
| M16664 | trpA | Tryptophan synthase, 3′ end | Sano, K. et al. “Structure and function of the trp operon control regions of |
| | | | Brevibacterium lactofermentum, a glutamic-acid-producing bacterium,” Gene, |
| | | | 52: 191-200 (1987) |
| M25819 | | Phosphoenolpyruvate carboxylase | O'Regan, M. et al. “Cloning and nucleotide sequence of the |
| | | | Phosphoenolpyruvate carboxylase-coding gene of Corynebacterium |
| | | | glutamicum ATCC13032,” Gene, 77(2): 237-251 (1989) |
| M85106 | | 23S rRNA gene insertion sequence | Roller, C. et al. “Gram-positive bacteria with a high DNA G + C content are |
| | | | characterized by a common insertion within their 23S rRNA genes,” J. Gen. |
| | | | Microbiol., 138: 1167-1175 (1992) |
| M85107, | | 23S rRNA gene insertion sequence | Roller, C. et al. “Gram-positive bacteria with a high DNA G + C content are |
| M85108 | | | characterized by a common insertion within their 23S rRNA genes,” J. Gen. |
| | | | Microbiol., 138: 1167-1175 (1992) |
| M89931 | aecD; brnQ; | Beta C-S lyase; branched-chain amino | Rossol, I. et al. “The Corynebacterium glutamicum aecD gene encodes a C-S |
| | yhbw | acid uptake carrier; hypothetical | lyase with alpha, beta-elimination activity that degrades aminoethylcysteine,” |
| | | protein yhbw | J. Bacteriol., 174(9): 2968-2977 (1992); Tauch, A. et al. “Isoleucine uptake in |
| | | | Corynebacterium glutamicum ATCC 13032 is directed by the brnQ gene |
| | | | product,” Arch. Microbiol., 169(4): 303-312 (1998) |
| S59299 | trp | Leader gene (promoter) | Herry, D. M. et al. “Cloning of the trp gene cluster from a tryptophan- |
| | | | hyperproducing strain of Corynebacterium glutamicum: identification of a |
| | | | mutation in the trp leader sequence,” Appl. Environ. Microbiol., 59(3): |
| | | | 791-799 (1993) |
| U11545 | trpD | Anthranilate phosphoribosyltransferase | O'Gara, J. P. and Dunican, L. K. (1994) Complete nucleotide sequence of the |
| | | | Corynebacterium glutamicum ATCC 21850 tpD gene.” Thesis, Microbiology |
| | | | Department, University College Galway, Ireland. |
| U13922 | cglIM; | Putative type II 5-cytosoine | Schafer, A. et al. “Cloning and characterization of a DNA region encoding a |
| | cglIR; clgIIR | methyltransferase; putative type II | stress-sensitive restriction system from Corynebacterium glutamicum ATCC |
| | | restriction endonuclease; putative type I or | 13032 and analysis of its role in intergeneric conjugation with Escherichia |
| | | type III restriction endonuclease | coli,” J. Bacteriol., 176(23): 7309-7319 (1994); Schafer, A. et al. “The |
| | | | Corynebacterium glutamicum cglIM gene encoding a 5-cytosine in an McrBC- |
| | | | deficient Escherichia coli strain,” Gene, 203(2): 95-101 (1997) |
| U14965 | recA | | |
| U31224 | ppx | | Ankri, S. et al. “Mutations in the Corynebacterium glutamicumproline |
| | | | biosynthetic pathway: A natural bypass of the proA step,” J. Bacteriol., |
| | | | 178(15): 4412-4419 (1996) |
| U31225 | proC | L-proline: NADP+ 5-oxidoreductase | Ankri, S. et al. “Mutations in the Corynebacterium glutamicumproline |
| | | | biosynthetic pathway: A natural bypass of the proA step,” J. Bacteriol., |
| | | | 178(15): 4412-4419 (1996) |
| U31230 | obg; proB; | ?; gamma glutamyl kinase; similar to D- | Ankri, S. et al. “Mutations in the Corynebacterium glutamicumproline |
| | unkdh | isomer specific 2-hydroxyacid | biosynthetic pathway: A natural bypass of the proA step,” J. Bacteriol., |
| | | dehydrogenases | 178(15): 4412-4419 (1996) |
| U31281 | bioB | Biotin synthase | Serebriiskii, I. G., “Two new members of the bio B superfamily: Cloning, |
| | | | sequencing and expression of bio B genes of Methylobacillus flagellatum and |
| | | | Corynebacterium glutamicum,” Gene, 175: 15-22 (1996) |
| U35023 | thtR; accBC | Thiosulfate sulfurtransferase; acyl CoA | Jager, W. et al. “A Corynebacterium glutamicum gene encoding a two-domain |
| | | carboxylase | protein similar to biotin carboxylases and biotin-carboxyl-carrier proteins,” |
| | | | Arch. Microbiol., 166(2); 76-82 (1996) |
| U43535 | cmr | Multidrug resistance protein | Jager, W. et al. “A Corynebacterium glutamicum gene conferring multidrug |
| | | | resistance in the heterologous host Escherichia coli,” J. Bacteriol., |
| | | | 179(7): 2449-2451 (1997) |
| U43536 | clpB | Heat shock ATP-binding protein | |
| U53587 | aphA-3 | 3′5″-aminoglycoside phosphotransferase | |
| U89648 | | Corynebacterium glutamicum unidentified | |
| | | sequence involved in histidine | |
| | | biosynthesis, partial sequence | |
| X04960 | trpA; trpB; | Tryptophan operon | Matsui, K. et al. “Complete nucleotide and deduced amino acid sequences of |
| | trpC; trpD; | | the Brevibacterium lactofermentum tryptophan operon,” Nucleic Acids Res., |
| | trpE; trpG; | | 14(24): 10113-10114 (1986) |
| | trpL | | |
| X07563 | lys A | DAP decarboxylase (meso- | Yeh, P. et al. “Nucleic sequence of the lysA gene of Corynebacterium |
| | | diaminopimelate decarboxylase, | glutamicum and possible mechanisms for modulation of its expression,” Mol. |
| | | EC 4.1.1.20) | Gen. Genet., 212(1): 112-119 (1988) |
| X14234 | EC 4.1.1.31 | Phosphoenolpyruvate carboxylase | Eikmanns, B. J. et al. “The Phosphoenolpyruvate carboxylase gene of |
| | | | Corynebacterium glutamicum: Molecular cloning, nucleotide sequence, and |
| | | | expression,” Mol. Gen. Genet., 218(2): 330-339 (1989); Lepiniec, L. et al. |
| | | | “Sorghum Phosphoenolpyruvate carboxylase gene family: structure, function |
| | | | and molecular evolution,” Plant. Mol. Biol., 21 (3): 487-502 (1993) |
| X17313 | fda | Fructose-bisphosphate aldolase | Von der Osten, C. H. et al. “Molecular cloning, nucleotide sequence and fine- |
| | | | structural analysis of the Corynebacterium glutamicum fda gene: structural |
| | | | comparison of C. glutamicum fructose-1, 6-biphosphate aldolase to class I and |
| | | | class II aldolases,” Mol. Microbiol., |
| X53993 | dapA | L-2, 3-dihydrodipicolinate synthetase (EC | Bonnassie, S. et al. “Nucleic sequence of the dapA gene from |
| | | 4.2.1.52) | Corynebacterium glutamicum,” Nucleic Acids Res., 18(21): 6421 (1990) |
| X54223 | | AttB-related site | Cianciotto, N. et al. “DNA sequence homology between att B-related sites of |
| | | | Corynebacterium diphtheriae, Corynebacterium ulcerans, Corynebacterium |
| | | | glutamicum, and the attP site of lambdacorynephage,” FEMS. Microbiol, |
| | | | Lett., 66: 299-302 (1990) |
| X54740 | argS; lysA | Arginyl-tRNA synthetase; | Marcel, T. et al. “Nucleotide sequence and organization of the upstream region |
| | | Diaminopimelate decarboxylase | of the Corynebacterium glutamicum lysA gene,” Mol. Microbiol., 4(11): |
| | | | 1819-1830 (1990) |
| X55994 | trpL; trpE | Putative leader peptide; anthranilate | Heery, D. M. et al. “Nucleotide sequence of the Corynebacterium glutamicum |
| | | synthase component 1 | trpE gene,” Nucleic Acids Res., 18(23): 7138 (1990) |
| X56037 | thrC | Threonine synthase | Han, K. S. et al. “The molecular structure of the Corynebacterium glutamicum |
| | | | threonine synthase gene,” Mol. Microbiol., 4(10): 1693-1702 (1990) |
| X56075 | attB-related | Attachment site | Cianciotto, N. et al. “DNA sequence homology between att B-related sites of |
| | site | | Corynebacterium diphtheriae, Corynebacterium ulcerans, Corynebacterium |
| | | | glutamicum, and the attP site of lambdacorynephage,” FEMS. Microbiol, |
| | | | Lett., 66: 299-302 (1990) |
| X57226 | lysC-alpha; | Aspartokinase-alpha subunit; | Kalinowski, J. et al. “Genetic and biochemical analysis of the Aspartokinase |
| | lysC-beta; | Aspartokinase-beta subunit; aspartate beta | from Corynebacterium glutamicum,” Mol. Microbiol., 5(5): 1197-1204 (1991); |
| | asd | semialdehyde dehydrogenase | Kalinowski, J. et al. “Aspartokinase genes lysC alpha and lysC beta overlap |
| | | | and are adjacent to the aspertate beta-semialdehyde dehydrogenase gene asd in |
| | | | Corynebacterium glutamicum,” Mol. Gen. Genet., 224(3): 317-324 (1990) |
| X59403 | gap; pgk; tpi | Glyceraldehyde-3-phosphate; | Eikmanns, B. J. “Identification, sequence analysis, and expression of a |
| | | phosphoglycerate kinase; triosephosphate | Corynebacterium glutamicum gene cluster encoding the three glycolytic |
| | | isomerase | enzymes glyceraldehyde-3-phosphate dehydrogenase, 3-phosphoglycerate |
| | | | kinase, and triosephosphate isomeras,” J. Bacteriol., 174(19): 6076-6086 |
| | | | (1992) |
| X59404 | gdh | Glutamate dehydrogenase | Bormann, E. R. et al. “Molecular analysis of the Corynebacterium glutamicum |
| | | | gdh gene encoding glutamate dehydrogenase,” Mol. Microbiol., 6(3): 317-326 |
| | | | (1992) |
| X60312 | lysI | L-lysine permease | Seep-Feldhaus, A. H. et al. “Molecular analysis of the Corynebacterium |
| | | | glutamicum lysl gene involved in lysine uptake,” Mol. Microbiol., 5(12): |
| | | | 2995-3005 (1991) |
| X66078 | cop1 | Ps1 protein | Joliff, G. et al. “Cloning and nucleotide sequence of the csp1 gene encoding |
| | | | PS1, one of the two major secreted proteins of Corynebacterium glutamicum: |
| | | | The deduced N-terminal region of PS1 is similar to the Mycobacterium antigen |
| | | | 85 complex,” Mol. Microbial., 6(16): 2349-2362 (1992) |
| X66112 | glt | Citrate synthase | Eikmanns, B. J. et al. “Cloning sequence, expression and transcriptional |
| | | | analysis of the Corynebacterium glutamicum gltA gene encoding citrate |
| | | | synthase,” Microbiol., 140: 1817-1828 (1994) |
| X67737 | dapB | Dihydrodipicolinate reductase | |
| X69103 | csp2 | Surface layer protein PS2 | Peyret, J. L. et al. “Characterization of the cspB gene encoding PS2, an ordered |
| | | | surface-layer protein in Corynebacterium glutamicum,” Mol. Microbiol., |
| | | | 9(1): 97-109 (1993) |
| X69104 | | IS3 related insertion element | Bonamy, C. et al. “Identification of IS1206, a Corynebacterium glutamicum |
| | | | IS3-related insertion sequence and phylogenetic analysis,” Mol. Microbial., |
| | | | 14(3): 571-581 (1994) |
| X70959 | leuA | Isopropylmalate synthase | Patek, M. et al. “Leucine synthesis in Corynebacterium glutamicum: enzyme |
| | | | activities, structure of leuA, and effect of leuA inactivation on lysine |
| | | | synthesis,” Appl. Environ. Microbiol., 60(1): 133-140 (1994) |
| X71489 | icd | Isocitrate dehydrogenase (NADP+) | Eikmanns, B. J. et al. “Cloning sequence analysis, expression, and inactivation |
| | | | of the Corynebacterium glutamicum icd gene encoding isocitrate |
| | | | dehydrogenase and biochemical characterization of the enzyme,” J. Bacteriol., |
| | | | 177(3): 774-782 (1995) |
| X72855 | GDHA | Glutamate dehydrogenase (NADP+) | |
| X75083, | mtrA | 5-methyltryptophan resistance | Heery, D. M. et al. “A sequence from a tryptophan-hyperproducing strain of |
| X70584 | | | Corynebacterium glutamicum encoding resistance to 5-methyltryptophan,” |
| | | | Biochem. Biophys. Res. Commun., 201(3): 1255-1262 (1994) |
| X75085 | recA | | Fitzpatrick, R. et al. “Construction and characterization of recA mutant strains |
| | | | of Corynebacterium glutamicum and Brevibacterium lactofermentum,” Appl. |
| | | | Microbiol. Biotechnol., 42(4): 575-580 (1994) |
| X75504 | aceA; thiX | Partial Isocitrate lyase; ? | Reinscheid, D. J. et al. “Characterization of the isocitrate lyase gene from |
| | | | Corynebacterium glutamicum and biochemical analysis of the enzyme,” J. |
| | | | Bacteriol., 176(12): 3474-3483 (1994) |
| X76875 | | ATPase beta-subunit | Ludwig, W. et al. “Phylogenetic relationships of bacteria based on comparative |
| | | | sequence analysis of elongation factor Tu and ATP-synthase beta-subunit |
| | | | genes,” Antonie Van Leeuwenhoek, 64: 285-305 (1993) |
| X77034 | tuf | Elongation factor Tu | Ludwig, W. et al. “Phylogenetic relationships of bacteria based on comparative |
| | | | sequence analysis of elongation factor Tu and ATP-synthase beta-subunit |
| | | | genes,” Antonie Van Leeuwenhoek, 64: 285-305 (1993) |
| X77384 | recA | | Billman-Jacobe, H. “Nucleotide sequence of a recA gene from |
| | | | Corynebacterium glutamicum,” DNA Seq., 4(6): 403-404 (1994) |
| X78491 | aceB | Malate synthase | Reinscheid, D. J. et al. “Malate synthase from Corynebacterium glutamicum |
| | | | pta-ack operon encoding phosphotransacetylase: sequence analysis,” |
| | | | Microbiology, 140: 3099-3108 (1994) |
| X80629 | 16S rDNA | 16S ribosomal RNA | Rainey, F. A. et al. “Phylogenetic analysis of the genera Rhodococcus and |
| | | | Norcardia and evidence for the evolutionary origin of the genus Norcardia |
| | | | from within the radiation of Rhodococcus species,” Microbiol., 141: 523-528 |
| | | | (1995) |
| X81191 | gluA; gluB; | Glutamate uptake system | Kronemeyer, W. et al. “Structure of the gluABCD cluster encoding the |
| | gluC; gluD | | glutamate uptake system of Corynebacterium glutamicum,” J. Bacteriol., |
| | | | 177(5): 1152-1158 (1995) |
| X81379 | dapE | Succinyldiaminopimelate desuccinylase | Wehrmann, A. et al. “Analysis of different DNA fragments of |
| | | | Corynebacterium glutamicum complementing dapE of Escherichia coli,” |
| | | | Microbiology, 40: 3349-56 (1994) |
| X82061 | 16S rDNA | 165 ribosomal RNA | Ruimy, R. et al. “Phylogeny of the genus Corynebacterium deduced from |
| | | | analyses of small-subunit ribosomal DNA sequences,” Int. J. Syst. Bacteriol., |
| | | | 45(4): 740-746 (1995) |
| X82928 | asd; lysC | Aspartate-semialdehyde dehydrogenase; ? | Serebrijski, I. et al. “Multicopy suppression by asd gene and osmotic stress- |
| | | | dependent complementation by heterologous proA in proA mutants,” J. |
| | | | Bacteriol., 177(24): 7255-7260 (1995) |
| X82929 | proA | Gamma-glutamyl phosphate reductase | Serebrijski, I. et al. “Multicopy suppression by asd gene and osmotic stress- |
| | | | dependent complementation by heterologous proA in proA mutants,” J. |
| | | | Bacteriol., 177(24): 7255-7260 (1995) |
| X84257 | 16S rDNA | 16S ribosomal RNA | Pascual, C. et al. “Phylogenetic analysis of the genus Corynebacterium based |
| | | | on 16S rRNA gene sequences,” Int. J. Syst. Bacteriol., 45(4): 724-728 (1995) |
| X85965 | aroP; dapE | Aromatic amino acid permease; ? | Wehrmann, A. et al. “Functional analysis of sequences adjacent to dapE of |
| | | | Corynebacterium glutamicumproline reveals the presence of aroP, which |
| | | | encodes the aromatic amino acid transporter,” J. Bacteriol., 177(20): |
| | | | 5991-5993 (1995) |
| X86157 | argB; argC; | Acetylglutamate kinase; N-acetyl-gamma- | Sakanyan, V. et al. “Genes and enzymes of the acetyl cycle of arginine |
| | argD; argF; | glutamyl-phosphate reductase; | biosynthesis in Corynebacterium glutamicum: enzyme evolution in the early |
| | argJ | acetylornithine aminotransferase; ornithine | steps of the arginine pathway,” Microbiology, 142: 99-108 (1996) |
| | | carbamoyltransferase; glutamate N- | |
| | | acetyltransferase | |
| X89084 | pta; ackA | Phosphate acetyltransferase; acetate kinase | Reinscheid, D. J. et al. “Cloning, sequence analysis, expression and |
| | | | inactivation of the Corynebacterium glutamicum pta-ack operon encoding |
| | | | phosphotransacetylase and acetate kinase,” Microbiology, 145: 503-513 (1999) |
| X89850 | attB | Attachment site | Le Marrec, C. et al. “Genetic characterization of site-specific integration |
| | | | functions of phi AAU2 infecting “Arthrobacter aureus C70,” J. Bacteriol., |
| | | | 178(7): 1996-2004 (1996) |
| X90356 | | Promoter fragment F1 | Patek, M. et al. “Promoters from Corynebacterium glutamicum: cloning, |
| | | | molecular analysis and search for a consensus motif,” Microbiology, |
| | | | 142: 1297-1309 (1996) |
| X90357 | | Promoter fragment F2 | Patek, M. et al. “Promoters from Corynebacterium glutamicum: cloning, |
| | | | molecular analysis and search for a consensus motif,” Microbiology, |
| | | | 142: 1297-1309 (1996) |
| X90358 | | Promoter fragment F10 | Patek, M. et al. “Promoters from Corynebacterium glutamicum: cloning, |
| | | | molecular analysis and search for a consensus motif,” Microbiology, |
| | | | 142: 1297-1309 (1996) |
| X90359 | | Promoter fragment F13 | Patek, M. et al. “Promoters from Corynebacterium glutamicum: cloning, |
| | | | molecular analysis and search for a consensus motif,” Microbiology, |
| | | | 142: 1297-1309 (1996) |
| X90360 | | Promoter fragment F22 | Patek, M. et al. “Promoters from Corynebacterium glutamicum: cloning, |
| | | | molecular analysis and search for a consensus motif,” Microbiology, |
| | | | 142: 1297-1309 (1996) |
| X90361 | | Promoter fragment F34 | Patek, M. et al. “Promoters from Corynebacterium glutamicum: cloning, |
| | | | molecular analysis and search for a consensus motif,” Microbiology, |
| | | | 142: 1297-1309 (1996) |
| X90362 | | Promoter fragment F37 | Patek, M. et al. “Promoters from Corynebacterium glutamicum: cloning, |
| | | | molecular analysis and search for a consensus motif,” Microbiology, |
| | | | 142: 1297-1309 (1996) |
| X90363 | | Promoter fragment F45 | Patek, M. et al. “Promoters from Corynebacterium glutamicum: cloning, |
| | | | molecular analysis and search for a consensus motif,” Microbiology, |
| | | | 142: 1297-1309 (1996) |
| X90364 | | Promoter fragment F64 | Patek, M. et al. “Promoters from Corynebacterium glutamicum: cloning, |
| | | | molecular analysis and search for a consensus motif,” Microbiology, |
| | | | 142: 1297-1309 (1996) |
| X90365 | | Promoter fragment F75 | Patek, M. et al. “Promoters from Corynebacterium glutamicum: cloning, |
| | | | molecular analysis and search for a consensus motif,” Microbiology, |
| | | | 142: 1297-1309 (1996) |
| X90366 | | Promoter fragment PF101 | Patek, M. et al. “Promoters from Corynebacterium glutamicum: cloning, |
| | | | molecular analysis and search for a consensus motif,” Microbiology, |
| | | | 142: 1297-1309 (1996) |
| X90367 | | Promoter fragment PF104 | Patek, M. et al. “Promoters from Corynebacterium glutamicum: cloning, |
| | | | molecular analysis and search for a consensus motif,” Microbiology, |
| | | | 142: 1297-1309 (1996) |
| X90368 | | Promoter fragment PF109 | Patek, M. et al. “Promoters from Corynebacterium glutamicum: cloning, |
| | | | molecular analysis and search for a consensus motif,” Microbiology, |
| | | | 142: 1297-1309 (1996) |
| X93513 | amt | Ammonium transport system | Siewe, R. M. et al. “Functional and genetic characterization of the (methyl) |
| | | | ammonium uptake carrier of Corynebacterium glutamicum,” J. Biol. Chem., |
| | | | 271(10): 5398-5403 (1996) |
| X93514 | betP | Glycine betaine transport system | Peter, H. et al. “Isolation, characterization, and expression of the |
| | | | Corynebacterium glutamicum betP gene, encoding the transport system for the |
| | | | compatible solute glycine betaine,” J. Bacteriol., 178(17): 5229-5234 (1996) |
| X95649 | orf4 | | Patek, M. et al. “Identification and transcriptional analysis of the dapB-ORF2- |
| | | | dapA-ORF4 operon of Corynebacterium glutamicum, encoding two enzymes |
| | | | involved in L-lysine synthesis,” Biotechnol. Lett., 19: 1113-1117 (1997) |
| X96471 | lysE; lysG | Lysine exporter protein; Lysine export | Vrljic, M. et al. “A new type of transporter with a new type of cellular |
| | | regulator protein | function: L-lysine export from Corynebacterium glutamicum,” Mol. |
| | | | Microbiol., 22(5): 815-826 (1996) |
| X96580 | panB; panC; | 3-methyl-2-oxobutanoate | Sahm, H. et al. “D-pantothenate synthesis in Corynebacterium glutamicum and |
| | xylB | hydroxymethyltransferase; pantoate-beta- | use of panBC and genes encoding L-valine synthesis for D-pantothenate |
| | | alanine ligase; xylulokinase | overproduction,” Appl. Environ. Microbiol., 65(5): 1973-1979 (1999) |
| X96962 | | Insertion sequence IS1207 and transposase | |
| X99289 | | Elongation factor P | Ramos, A. et al. “Cloning, sequencing and expression of the gene encoding |
| | | | elongation factor P in the amino-acid producer Brevibacterium lactofermentum |
| | | | (Corynebacterium glutamicum ATCC 13869),” Gene, 198: 217-222 (1997) |
| Y00140 | thrB | Homoserine kinase | Mateos, L. M. et al. “Nucleotide sequence of the homoserine kinase (thrB) |
| | | | gene of the Brevibacterium lactofermentum,” Nucleic Acids Res., 15(9): |
| | | | 3922 (1987) |
| Y00151 | ddh | Meso-diaminopimelate D-dehydrogenase | Ishino, S. et al. “Nucleotide sequence of the meso-diaminopimelate D- |
| | | (EC 1.4.1.16) | dehydrogenase gene from Corynebacterium glutamicum,” Nucleic Acids Res., |
| | | | 15(9): 3917 (1987) |
| Y00476 | thrA | Homoserine dehydrogenase | Mateos, L. M. et al. “Nucleotide sequence of the homoserine dehydrogenase |
| | | | (thrA) gene of the Brevibacterium lactofermentum,” Nucleic Acids Res., |
| | | | 15(24): 10598 (1987) |
| Y00546 | hom; thrB | Homoserine dehydrogenase; homoserine | Peoples, O. P. et al. “Nucleotide sequence and fine structural analysis of the |
| | | kinase | Corynebacterium glutamicum hom-thrB operon,” Mol. Microbiol., 2(1): |
| | | | 63-72 (1988) |
| Y08964 | murC; ftsQ/ | UPD-N-acetylmuramate-alanine ligase; | Honrubia, M. P. et al. “Identification, characterization, and chromosomal |
| | divD; ftsZ | division initiation protein or cell division | organization of the ftsZ gene from Brevibacterium lactofermentum,” Mol. Gen. |
| | | protein; cell division protein | Genet., 259(1): 97-104 (1998) |
| Y09163 | putP | High affinity proline transport system | Peter, H. et al. “Isolation of the putP gene of Corynebacterium |
| | | | glutamicumproline and characterization of a low-affinity uptake system for |
| | | | compatible solutes,” Arch. Microbiol., 168(2): 143-15 (1997) |
| Y09548 | pyc | Pyruvate carboxylase | Peters-Wendisch, P. G. et al. “Pyruvate carboxylase from Corynebacterium |
| | | | glutamicum: characterization, expression and inactivation of the pyc gene,” |
| | | | Microbiology, 144: 915-927 (1998) |
| Y09578 | leuB | 3-isopropylmalate dehydrogenase | Patek, M. et al. “Analysis of the leuB gene from Corynebacterium |
| | | | glutamicum,” Appl. Microbiol. Biotechnol., 50(1): 42-47 (1998) |
| Y12472 | | Attachment site bacteriophage Phi-16 | Moreau, S. et al. “Site-specific integration of corynephage Phi-16: The |
| | | | construction of an integration vector,” Microbiol., 145: 539-548 (1999) |
| Y12537 | proP | Proline/ectoine uptake system protein | Peter, H. et al. “Corynebacterium glutamicum is equipped with four secondary |
| | | | carriers for compatible solutes: Identification, sequencing, and characterization |
| | | | of the proline/ectoine uptake system, ProP, and the ectoine/proline/glycine |
| | | | betaine carrier, EctP,” J. Bacteriol., 180(22): 6005-6012 (1998) |
| Y13221 | glnA | Glutamine synthetase I | Jakoby, M. et al. “Isolation of Corynebacterium glutamicum glnA gene |
| | | | encoding glutamine synthetase I,” FEMS Microbiol. Lett., 154(1): |
| | | | 81-88 (1997) |
| Y16642 | lpd | Dihydrolipoamide dehydrogenase | |
| Y18059 | | Attachment site Corynephage 304L | Moreau, S. et al. “Analysis of the integration functions of &phi;304L: An |
| | | | integrase module among corynephages,” Virology, 255(1): 150-159 (1999) |
| Z21501 | argS; lysA | Arginyl-tRNA synthetase; | Oguiza, J. A. et al. “A gene encoding arginyl-tRNA synthetase is located in the |
| | | diaminopimelate decarboxylase (partial) | upstream region of the lysA gene in Brevibacterium lactofermentum: |
| | | | Regulation of argS-lysA cluster expression by arginine,” J. Bacteriol., |
| | | | 175(22): 7356-7362 (1993) |
| Z21502 | dapA; dapB | Dihydrodipicolinate synthase; | Pisabarro, A. et al. “A cluster of three genes (dapA, orf2, and dapB) of |
| | | dihydrodipicolinate reductase | Brevibacterium lactofermentum encodes dihydrodipicolinate reductase, and a |
| | | | third polypeptide of unknown function,” J. Bacteriol., 175(9): 2743-2749 |
| | | | (1993) |
| Z29563 | thrC | Threonine synthase | Malumbres, M. et al. “Analysis and expression of the thrC gene of the encoded |
| | | | threonine synthase,” Appl. Environ. Microbiol., 60(7)2209-2219 (1994) |
| Z46753 | 16S rDNA | Gene for 16S ribosomal RNA | |
| Z49822 | sigA | SigA sigma factor | Oguiza, J. A. et al “Multiple sigma factor genes in Brevibacterium |
| | | | lactofermentum: Characterization of sigA and sigB,” J. Bacteriol., 178(2): |
| | | | 550-553 (1996) |
| Z49823 | galE; dtxR | Catalytic activity UDP-galactose 4- | Oguiza, J. A. et al “The galE gene encoding the UDP-galactose 4-epimerase of |
| | | epimerase; diphtheria toxin regulatory | Brevibacterium lactofermentum is coupled transcriptionally to the dmdR |
| | | protein | gene,” Gene, 177: 103-107 (1996) |
| Z49824 | orf1; sigB | ?; SigB sigma factor | Oguiza, J. A. et al “Multiple sigma factor genes in Brevibacterium |
| | | | lactofermentum: Characterization of sigA and sigB,” J. Bacteriol., 178(2): |
| | | | 550-553 (1996) |
| Z66534 | | Transposase | Correia, A. et al. “Cloning and characterization of an IS-like element present in |
| | | | the genome of Brevibacterium lactofermentum ATCC 13869,” Gene, |
| | | | 170(1): 91-94 (1996) |

¹A sequence for this gene was published in the indicated reference. However, the sequence obtained by the inventors of the present application is significantly longer than the published version. It is believed that the published version relied on an incorrect start codon, and thus represents only a fragment of the actual coding region.

[0173] TABLE 1
GENES IN THE APPLICATION

| | |
|---|---|
| Nucleic | Amino |
| Acid | Acid |

| | | | | |
|---|---|---|---|---|
| SEQ ID | SEQ ID | Identification | NT | NT |

| | | | | | | |
|---|---|---|---|---|---|---|
| NO | NO | Code | Contig. | Start | Stop | Function |

| | | | | | | |
|---|---|---|---|---|---|---|
| 1 | 2 | RXA00775 | GR00205 | 6057 | 5287 | PHOSPHATE TRANSPORT ATP-BINDING PROTEIN PSTB |
| 3 | 4 | RXA00776 | GR00205 | 7016 | 6096 | PHOSPHATE TRANSPORT SYSTEM PERMEASE PROTEIN PSTA |
| 5 | 6 | RXA00777 | GR00205 | 8098 | 7034 | PHOSPHATE TRANSPORT SYSTEM PERMEASE PROTEIN PSTC |
| 7 | 8 | RXA00774 | GR00205 | 4546 | 5199 | PHOSPHATE TRANSPORT SYSTEM REGULATORY PROTEIN |
| 9 | 10 | RXA00204 | GR00032 | 3783 | 2212 | RIBOSE TRANSPORT ATP-BINDING PROTEIN RBSA |
| 11 | 12 | RXA02438 | GR00709 | 3236 | 2478 | RIBOSE TRANSPORT ATP-BINDING PROTEIN RBSA |
| 13 | 14 | RXA00203 | GR00032 | 2152 | 1241 | RIBOSE TRANSPORT SYSTEM PERMEASE PROTEIN RBSC |
| 15 | 16 | RXA00270 | GR00041 | 2720 | 1833 | RIBOSE TRANSPORT SYSTEM PERMEASE PROTEIN RBSC |
| 17 | 18 | RXA02439 | GR00709 | 4258 | 3236 | RIBOSE TRANSPORT SYSTEM PERMEASE PROTEIN RBSC |
| 19 | 20 | RXN02994 | VV0070 | 2 | 724 | GLUTAMINE TRANSPORT ATP-BINDING PROTEIN GLNQ |
| 21 | 22 | F RXA01245 | GR00360 | 2 | 1768 | COPPER/POTASSIUM-TRANSPORTING ATPASE B (EC 3.6.1.36) |

Lipoprotein and Lipopolysaccharide synthesis

| | |
|---|---|
| Nucleic | Amino |
| Acid | Acid |

| | | | | |
|---|---|---|---|---|
| SEQ ID | SEQ ID | Identification | NT | NT |

| | | | | | | |
|---|---|---|---|---|---|---|
| NO | NO | Code | Contig. | Start | Stop | Function |

| | | | | | | |
|---|---|---|---|---|---|---|
| 23 | 24 | RXA00002 | GR00001 | 2278 | 1595 | DOLICHOL-PHOSPHATE MANNOSYLTRANSFERASE |
| | | | | | | (EC 2.4.1.83)/APOLIPOPROTEIN |
| | | | | | | N-ACYLTRANSFERASE (EC 2.3.1.-) |
| 25 | 26 | RXA00160 | GR00024 | 4044 | 4616 | LIPOPROTEIN NLPD/LPPB HOMOLOG PRECURSOR |
| 27 | 28 | RXA00345 | GR00064 | 90 | 1040 | Zn-binding lipoprotein |
| 29 | 30 | RXA00413 | GR00092 | 3859 | 2963 | OUTER MEMBRANE LIPOPROTEIN 3 PRECURSOR |
| 31 | 32 | RXA00482 | GR00119 | 18891 | 18244 | OUTER MEMBRANE LIPOPROTEIN BLC PRECURSOR |
| 33 | 34 | RXN01164 | VV0117 | 15894 | 14260 | DOLICHOL-PHOSPHATE MANNOSYLTRANSFERASE |
| | | | | | | (EC 2.4.1.83)/APOLIPOPROTEIN |
| | | | | | | N-ACYLTRANSFERASE (EC 2.3.1.-) |
| 35 | 36 | F RXA01164 | GR00332 | 1579 | 5 | DOLICHOL-PHOSPHATE MANNOSYLTRANSFERASE |
| | | | | | | (EC 2.4.1.83)/APOLIPOPROTEIN |
| | | | | | | N-ACYLTRANSFERASE (EC 2.3.1.-) |
| 37 | 38 | RXN01168 | VV0117 | 14224 | 13415 | DOLICHOL-PHOSPHATE MANNOSYLTRANSFERASE |
| | | | | | | (EC 2.4.1.83)/APOLIPOPROTEIN |
| | | | | | | N-ACYLTRANSFERASE (EC 2.3.1.-) |
| 39 | 40 | F RXA01168 | GR00333 | 1285 | 566 | DOLICHOL-PHOSPHATE MANNOSYLTRANSFERASE |
| | | | | | | (EC 2.4.1.83)/APOLIPOPROTEIN |
| | | | | | | N-ACYLTRANSFERASE (EC 2.3.1.-) |
| 41 | 42 | RXN02062 | VV0222 | 3159 | 1990 | Lipopolysaccharide N-acetylglucosaminyltransferase |
| 43 | 44 | F RXA02062 | GR00626 | 3159 | 1990 | Lipopolysaccharide N-acetylglucosaminyltransferase |
| 45 | 46 | RXA02222 | GR00651 | 9420 | 9794 | PUTATIVE HOST CELL SURFACE-EXPOSED LIPOPROTEIN |
| 47 | 48 | RXA02313 | GR00665 | 5812 | 4592 | Lipopolysaccharide N-acetylglucosaminyltransferase |
| 49 | 50 | RXA02491 | GR00720 | 902 | 2155 | Lipopolysaccharide N-acetylglucosaminyltransferase |
| 51 | 52 | RXN02595 | VV0098 | 11098 | 9935 | Lipopolysaccharide N-acetylglucosaminyltransferase |
| 53 | 54 | F RXA02595 | GR00741 | 19052 | 19702 | Lipopolysaccharide N-acetylglucosaminyltransferase |
| 55 | 56 | RXA02616 | GR00745 | 598 | 1308 | LIPOPROTEIN NLPD PRECURSOR |
| 57 | 58 | RXA02627 | GR00747 | 2981 | 2139 | DTXR/IRON-REGULATED LIPOPROTEIN PRECURSOR |
| 59 | 60 | RXA02650 | GR00752 | 1460 | 2038 | LIPOPROTEIN SIGNAL PEPTIDASE (EC 3.4.23.36) |
| 61 | 62 | RXA01094 | GR00306 | 2703 | 1756 | PROLIPOPROTEIN DIACYLGLYCERYL TRANSFERASE |
| | | | | | | (EC 2.4.99.-) |
| 63 | 64 | RXN00934 | VV0171 | 15181 | 14099 | (AE000805) LPS biosynthesis RfbU related protein |
| | | | | | | [Methanobacterium thermoautotrophicum] |
| 65 | 66 | F RXA00934 | GR00253 | 6835 | 6047 | (AE000805) LPS biosynthesis RfbU related protein |
| | | | | | | [Methanobacterium thermoautotrophicum] |
| 67 | 68 | RXA02605 | GR00742 | 11557 | 12051 | ANTIGEN 85-B PRECURSOR |

ABC-Transporter

| | |
|---|---|
| Nucleic | Amino |
| Acid | Acid |

| | | | | |
|---|---|---|---|---|
| SEQ ID | SEQ ID | Identification | NT | NT |

| | | | | | | |
|---|---|---|---|---|---|---|
| NO | NO | Code | Contig. | Start | Stop | Function |

| | | | | | | |
|---|---|---|---|---|---|---|
| 69 | 70 | RXN00525 | VV0079 | 26304 | 27566 | Hypothetical ABC Transporter Permease Protein |
| 71 | 72 | F RXA00525 | GR00136 | 664 | 5 | Hypothetical ABC Transporter Permease Protein |
| 73 | 74 | F RXA00556 | GR00146 | 1 | 594 | Hypothetical ABC Transporter Permease Protein |
| 75 | 76 | RXA02750 | GR00764 | 5079 | 5894 | Hypothetical ABC Transporter Permease Protein |
| 77 | 78 | RXN02096 | VV0126 | 20444 | 22135 | Hypothetical ABC Transporter Permease Protein |
| 79 | 80 | F RXA02096 | GR00629 | 15458 | 16774 | Hypothetical ABC Transporter Permease Protein |
| 81 | 82 | RXA02562 | GR00732 | 796 | 1515 | PUTATIVE ABC TRANSPORTER |
| 83 | 84 | RXA00950 | GR00260 | 173 | 1078 | similar to ABC transporter (ATP-binding protein) |
| | | | | | | START CODON GTG |
| 85 | 86 | RXA02119 | GR00636 | 4222 | 2582 | similar to ABC transporter (ATP-binding protein) |
| 87 | 88 | RXA01185 | GR00338 | 2451 | 1594 | ATP-BINDING PROTEIN |
| 89 | 90 | RXN00412 | VV0086 | 53923 | 52844 | Hypothetical Amino Acid ABC Transporter ATP-Binding Protein |
| 91 | 92 | F RXA00412 | GR00092 | 2764 | 1685 | ATP-BINDING PROTEIN ABC |
| 93 | 94 | RXN02925 | VV0104 | 543 | 2759 | COPPER/POTASSIUM-TRANSPORTING ATPASE B |
| | | | | | | (EC 3.6.1.36) |
| 95 | 96 | RXN00939 | VV0079 | 45152 | 43917 | COPPER/POTASSIUM-TRANSPORTING ATPASE B |
| | | | | | | (EC 3.6.1.36) |
| 97 | 98 | F RXA00939 | GR00256 | 1501 | 1334 | COPPER/POTASSIUM-TRANSPORTING ATPASE B |
| | | | | | | (EC 3.6.1.36) |
| 99 | 100 | RXN01323 | VV0082 | 4321 | 6585 | COPPER/POTASSIUM-TRANSPORTINGATPASE B |
| | | | | | | (EC 3.6.1.36) |
| 101 | 102 | F RXA01323 | GR00385 | 1175 | 3439 | similar to heavy metal-transporting ATPase |
| 103 | 104 | RXN00702 | VV0005 | 12478 | 10772 | COBALT TRANSPORT ATP-BINDING PROTEIN CBIO |
| 105 | 106 | F RXA00702 | GR00182 | 2165 | 846 | COBALT TRANSPORT ATP-BINDING PROTEIN CBIO |
| 107 | 108 | RXN00828 | VV0180 | 1376 | 1828 | COBALT TRANSPORT ATP-BINDING PROTEIN CBIO |
| 109 | 110 | F RXA00828 | GR00223 | 1687 | 1319 | COBALT TRANSPORT ATP-BINDING PROTEIN CBIO |
| 111 | 112 | RXN03020 | VV0139 | 606 | 4 | GLUTAMINE TRANSPORT ATP-BINDING PROTEIN GLNQ |
| 113 | 114 | RXN00726 | VV0188 | 1 | 591 | GLUTAMINE TRANSPORT ATP-BINDING PROTEIN GLNQ |
| 115 | 116 | RXN02570 | VV0101 | 11699 | 12340 | MALTOSE TRANSPORT SYSTEM PERMEASE PROTEIN MALF |
| 117 | 118 | RXN02354 | VV0095 | 473 | 1306 | MALTOSE TRANSPORT SYSTEM PERMEASE PROTEIN MALG |
| 119 | 120 | F RXA02354 | GR00682 | 473 | 1261 | MALTOSE TRANSPORT SYSTEM PERMEASE PROTEIN MALG |
| 121 | 122 | RXN00001 | VV0196 | 4023 | 2896 | MALTOSE/MALTODEXTRIN TRANSPORT ATP-BINDING PROTEIN |
| | | | | | | MALK |
| 123 | 124 | F RXA00001 | GR00001 | 1386 | 259 | SN-GLYCEROL-3-PHOSPHATE TRANSPORT ATP-BINDING |
| | | | | | | PROTEIN UGPC |
| 125 | 126 | RXN02356 | VV0051 | 1868 | 873 | MALTOSE/MALTODEXTRIN TRANSPORT ATP-BINDING PROTEIN |
| | | | | | | MALK |
| 127 | 128 | RXN02455 | VV0196 | 1273 | 5 | MALTOSE-BINDING PROTEIN PRECURSOR |
| 129 | 130 | RXN02795 | VV0176 | 29237 | 27801 | OLIGOPEPTIDE TRANSPORT ATP-BINDING PROTEIN APPF |
| 131 | 132 | F RXA02795 | GR00778 | 3 | 1097 | OLIGOPEPTIDE TRANSPORT ATP-BINDING PROTEIN APPF |
| 133 | 134 | RXN01939 | VV0139 | 22695 | 20965 | OLIGOPEPTIDE TRANSPORT ATP-BINDING PROTEIN OPPD |
| 135 | 136 | F RXA00761 | GR00203 | 8530 | 9120 | OLIGOPEPTIDE TRANSPORT ATP-BINDING PROTEIN OPPD |
| 137 | 138 | F RXA01939 | GR00556 | 2042 | 1440 | OLIGOPEPTIDE TRANSPORT ATP-BINDING PROTEIN OPPD |
| 139 | 140 | RXN00759 | VV0139 | 24645 | 23722 | OLIGOPEPTIDE TRANSPORT SYSTEM PERMEASE PROTEIN OPPB |
| 141 | 142 | F RXA00759 | GR00203 | 6580 | 7503 | OLIGOPEPTIDE TRANSPORT SYSTEM PERMEASE PROTEIN OPPB |
| 143 | 144 | RXN00431 | VV0112 | 8987 | 8199 | O-ANTIGEN EXPORT SYSTEM ATP-BINDING PROTEIN RFBE |
| 145 | 146 | F RXA00431 | GR00099 | 119 | 793 | ABCA PROTEIN two-component ABC transporter involved |
| | | | | | | in the metabolism of two wall teichoic acids |
| 147 | 148 | RXN00732 | VV0132 | 1 | 1647 | PROBABLE TRANSPORT ATP-BINDING PROTEIN MSBA |
| 149 | 150 | F RXA00732 | GR00196 | 826 | 5 | PROBABLE TRANSPORT ATP-BINDING PROTEIN MSBA |
| 151 | 152 | F RXA00734 | GR00197 | 863 | 411 | Hypothetical ABC Transporter ATP-Binding Protein |
| 153 | 154 | RXN01808 | VV0216 | 3 | 1151 | PUTATIVE ABC TRANPORTER |
| 155 | 156 | F RXA01808 | GR00509 | 8993 | 7875 | PUTATIVE ABC TRANPORTER |
| 157 | 158 | RXN02975 | VV0231 | 252 | 4 | Hypothetical ABC Transporter ATP-Binding Protein |
| 159 | 160 | RXN03116 | VV0090 | 38067 | 38675 | MALTOSE/MALTODEXTRIN TRANSPORT ATP-BINDING |
| | | | | | | PROTEIN MALK |
| 161 | 162 | RXN03108 | VV0077 | 5535 | 5801 | NITRATE TRANSPORT ATP-BINDING PROTEIN NRTD |
| 163 | 164 | RXN03129 | VV0122 | 24042 | 22819 | SN-GLYCEROL-3-PHOSPHATE TRANSPORT ATP-BINDING |
| | | | | | | PROTEIN UGPC |
| 165 | 166 | F RXA01890 | GR00541 | 874 | 155 | SN-GLYCEROL-3-PHOSPHATE TRANSPORT ATP-BINDING |
| | | | | | | PROTEIN UGPC |
| 167 | 168 | RXN02945 | VV0180 | 492 | 1424 | COBALT TRANSPORT ATP-BINDING PROTEIN CBIO |

Other transporters

| | |
|---|---|
| Nucleic | Amino |
| Acid | Acid |

| | | | | |
|---|---|---|---|---|
| SEQ ID | SEQ ID | Identification | NT | NT |

| | | | | | | |
|---|---|---|---|---|---|---|
| NO | NO | Code | Contig. | Start | Stop | Function |

| | | | | | | |
|---|---|---|---|---|---|---|
| 169 | 170 | RXA01247 | GR00361 | 256 | 489 | COPPER/POTASSIUM-TRANSPORTING ATPASE B (EC 3.6.1.36) |
| 171 | 172 | RXN00099 | VV0129 | 18876 | 17704 | CYANATE TRANSPORT PROTEIN CYNX |
| 173 | 174 | F RXA00099 | GR00014 | 8172 | 9344 | CYANATE TRANSPORT PROTEIN CYNX |
| 175 | 176 | RXA00634 | GR00166 | 3732 | 5114 | DI-/TRIPEPTIDE TRANSPORTER |
| 177 | 178 | RXA02451 | GR00710 | 3484 | 5007 | DI-/TRIPEPTIDE TRANSPORTER |
| 179 | 180 | RXA02394 | GR00697 | 1895 | 585 | DICARBOXYLATE TRANSPORTER |
| 181 | 182 | RXA01012 | GR00288 | 3748 | 2108 | DIPEPTIDE TRANSPORT ATP-BINDING PROTEIN DPPD |
| 183 | 184 | RXA02660 | GR00753 | 548 | 1186 | DIPEPTIDE TRANSPORT SYSTEM PERMEASE PROTEIN DPPB |
| 185 | 186 | RXA02661 | GR00753 | 1239 | 1457 | DIPEPTIDE TRANSPORT SYSTEM PERMEASE PROTEIN DPPB |
| 187 | 188 | RXA02034 | GR00619 | 1787 | 822 | DIPEPTIDE TRANSPORT SYSTEM PERMEASE PROTEIN DPPB |
| 189 | 190 | RXA01013 | GR00288 | 4549 | 3755 | DIPEPTIDE TRANSPORT SYSTEM PERMEASE PROTEIN DPPC |
| 191 | 192 | RXN02933 | VV0176 | 30042 | 29233 | DIPEPTIDE TRANSPORT SYSTEM PERMEASE PROTEIN DPPC |
| 193 | 194 | F RXA02033 | GR00619 | 800 | 12 | DIPEPTIDE TRANSPORT SYSTEM PERMEASE PROTEIN DPPC |
| 195 | 196 | RXA01006 | GR00287 | 862 | 5 | DIPEPTIDE TRANSPORTER PROTEIN DPPB |
| 197 | 198 | RXA02312 | GR00665 | 4459 | 3101 | D-SERINE/D-ALANINE/GLYCINE TRANSPORTER |
| 199 | 200 | RXA00090 | GR00013 | 6644 | 7762 | FERRIC ANGUIBACTIN TRANSPORT SYSTEM PERMEASE |
| | | | | | | PROTEIN FATC |
| 201 | 202 | RXA00089 | GR00013 | 5656 | 6654 | FERRIC ANGUIBACTIN TRANSPORT SYSTEM PERMEASE |
| | | | | | | PROTEIN FATD |
| 203 | 204 | RXN01285 | VV0215 | 1780 | 1055 | FERRIC ENTEROBACTIN TRANSPORT ATP-BINDING PROTEIN |
| | | | | | | FEPC |
| 205 | 206 | F RXA01285 | GR00371 | 3 | 545 | FERRIC ENTEROBACTIN TRANSPORT ATP-BINDING PROTEIN |
| | | | | | | FEPC |
| 207 | 208 | RXA02728 | GR00761 | 184 | 996 | FERRIC ENTEROBACTIN TRANSPORT ATP-BINDING PROTEIN |
| | | | | | | FEPC |
| 209 | 210 | RXN03080 | VV0045 | 1670 | 2449 | FERRIC ENTEROBACTIN TRANSPORT ATP-BINDING PROTEIN |
| | | | | | | FEPC |
| 211 | 212 | F RXA02864 | GR10007 | 2806 | 2027 | FERRIC ENTEROBACTIN TRANSPORT ATP-BINDING PROTEIN |
| | | | | | | FEPC |
| 213 | 214 | RXN00523 | VV0194 | 1363 | 338 | FERRIC ENTEROBACTIN TRANSPORT PROTEIN FEPG |
| 215 | 216 | F RXA00523 | GR00135 | 30 | 779 | FERRIC ENTEROBACTIN TRANSPORT PROTEIN FEPG |
| 217 | 218 | RXA01289 | GR00372 | 2376 | 3419 | FERRIC ENTEROBACTIN TRANSPORT PROTEIN FEPG |
| 219 | 220 | RXA01290 | GR00372 | 3412 | 4575 | FERRIC ENTEROBACTIN TRANSPORT PROTEIN FEPG |
| 221 | 222 | RXA01822 | GR00516 | 6 | 587 | FERRIC ENTEROBACTIN TRANSPORT PROTEIN FEPG |
| 223 | 224 | RXN00466 | VV0086 | 63271 | 64266 | Ferrichrome transport proteins |
| 225 | 226 | F RXA00466 | GR00117 | 947 | 1933 | Ferrichrome transport proteins |
| 227 | 228 | RXN03081 | VV0045 | 2476 | 2934 | FERRIENTEROBACTIN-BINDING PERIPLASMIC PROTEIN |
| | | | | | | PRECURSOR |
| 229 | 230 | F RXA02863 | GR10007 | 2000 | 1026 | Ferrichrome transport proteins |
| 231 | 232 | RXS03221 | | | | GALACTOSE-PROTON SYMPORT |
| 233 | 234 | F RXA01986 | GR00575 | 622 | 5 | GALACTOSE-PROTON SYMPORT |
| 235 | 236 | RXN02447 | VV0107 | 14297 | 13203 | GALACTOSE-PROTON SYMPORT |
| 237 | 238 | F RXA02447 | GR00710 | 1 | 270 | GALACTOSE-PROTON SYMPORT |
| 239 | 240 | F RXA02769 | GR00771 | 1 | 711 | GALACTOSE-PROTON SYMPORT |
| 241 | 242 | RXS503220 | | | | D-XYLOSE-PROTON SYMPORT |
| 243 | 244 | F RXA02762 | GR00768 | 346 | 630 | D-XYLOSE PROTON-SYMPORTER |
| 245 | 246 | F RXA02761 | GR00768 | 153 | 353 | GALACTOSE-PROTON SYMPORT |
| 247 | 248 | RXA00123 | GR00019 | 7029 | 5911 | MAGNESIUM AND COBALT TRANSPORT PROTEIN CORA |
| 249 | 250 | RXA02441 | GR00709 | 5940 | 5284 | MANGANESE TRANSPORT SYSTEM ATP-BINDING PROTEIN MNTA |
| 251 | 252 | RXN02442 | VV0217 | 5970 | 6818 | zinc transport system membrane protein |
| 253 | 254 | F RXA02442 | GR00709 | 5970 | 6818 | MANGANESE TRANSPORT SYSTEM MEMBRANE PROTEIN MNTB |
| 255 | 256 | RXA01756 | GR00498 | 2069 | 762 | MG2+ TRANSPORTER MGTE |
| 257 | 258 | RXA02068 | GR00627 | 2 | 1120 | MG2+ TRANSPORTER MGTE |
| 259 | 260 | RXA00665 | GR00174 | 135 | 572 | MG2+/CITRATE COMPLEX SECONDARY TRANSPORTER |
| 261 | 262 | RXA02808 | GR00789 | 1 | 258 | MG2+/CITRATE COMPLEX SECONDARY TRANSPORTER |
| 263 | 264 | RXN00444 | VV0112 | 20785 | 19949 | MOLYBDENUM TRANSPORT SYSTEM PERMEASE PROTEIN MODB |
| 265 | 266 | F RXA00444 | GR00106 | 626 | 1402 | MOLYBDENUM TRANSPORT SYSTEM PERMEASE PROTEIN MODB |
| 267 | 268 | RXN02614 | VV0313 | 5964 | 5236 | TAURINE TRANSPORT ATP-BINDING PROTEIN TAUB |
| 269 | 270 | F RXA02614 | GR00743 | 5964 | 5236 | NITRATE TRANSPORT ATP-BINDING PROTEIN NRTC |
| 271 | 272 | RXN01142 | VV0077 | 5805 | 6302 | NITRATE TRANSPORT ATP-BINDING PROTEIN NRTD |
| 273 | 274 | F RXA01142 | GR00320 | 721 | 302 | NITRATE TRANSPORT ATP-BINDING PROTEIN NRTD |
| 275 | 276 | RXN01141 | VV0077 | 4644 | 5468 | NITRATE TRANSPORT PROTEIN NRTA |
| 277 | 278 | F RXA01135 | GR00318 | 327 | 4 | NITRATE TRANSPORT PROTEIN NRTA |
| 279 | 280 | F RXA01141 | GR00319 | 636 | 175 | NITRATE TRANSPORT PROTEIN NRTA |
| 281 | 282 | RXA00728 | GR00193 | 1658 | 2449 | NOPALINE TRANSPORT SYSTEM PERMEASE PROTEIN NOCM |
| 283 | 284 | RXA02663 | GR00753 | 2059 | 3453 | OLIGOPEPTIDE TRANSPORT ATP-BINDING PROTEIN OPPD |
| 285 | 286 | RXA02664 | GR00753 | 3611 | 4270 | OLIGOPEPTIDE TRANSPORT ATP-BINDING PROTEIN OPPF |
| 287 | 288 | RXA00760 | GR00203 | 7499 | 8530 | OLIGOPEPTIDE TRANSPORT SYSTEM PERMEASE PROTEIN OPPC |
| 289 | 290 | RXA02035 | GR00619 | 3295 | 1787 | PERIPLASMIC DIPEPTIDE TRANSPORT PROTEIN PRECURSOR |
| 291 | 292 | RXN01002 | VV0106 | 8858 | 8055 | PHOSPHONATES TRANSPORT ATP-BINDING PROTEIN PHNC |
| 293 | 294 | F RXA01002 | GR00285 | 3 | 419 | PHOSPHONATES TRANSPORT ATP-BINDING PROTEIN PHNC |
| 295 | 296 | RXN01000 | VV0106 | 7252 | 6407 | PHOSPHONATES TRANSPORT SYSTEM PERMEASE PROTEIN PHNE |
| 297 | 298 | F RXA01000 | GR00284 | 2 | 541 | PHOSPHONATES TRANSPORT SYSTEM PERMEASE PROTEIN PHNE |
| 299 | 300 | RXA01003 | GR00285 | 419 | 1222 | PHOSPHONATES TRANSPORT SYSTEM PERMEASE PROTEIN PHNE |
| 301 | 302 | RXN00193 | VV0371 | 1 | 594 | POTENTIAL STARCH DEGRADATION PRODUCTS TRANSPORT |
| | | | | | | SYSTEM PERMEASE AMYD |
| 303 | 304 | F RXA00193 | GR00029 | 10101 | 9259 | POTENTIAL STARCH DEGRADATION PRODUCTS TRANSPORT |
| | | | | | | SYSTEM PERMEASE AMYD |
| 305 | 306 | RXN01298 | VV0116 | 2071 | 1142 | POTENTIAL STARCH DEGRADATION PRODUCTS TRANSPORT |
| | | | | | | SYSTEM PERMEASE PROTEIN AMYD |
| 307 | 308 | F RXA01298 | GR00374 | 1254 | 862 | POTENTIAL STARCH DEGRADATION PRODUCTS TRANSPORT |
| | | | | | | SYSTEM PERMEASE PROTEIN AMYD |
| 309 | 310 | F RXA02422 | GR00705 | 8200 | 8634 | POTENTIAL STARCH DEGRADATION PRODUCTS TRANSPORT |
| | | | | | | SYSTEM PERMEASE PROTEIN AMYD |
| 311 | 312 | RXN02515 | VV0087 | 962 | 1717 | Hypothetical ABC Transporter ATP-Binding Protein |
| 313 | 314 | F RXA02515 | GR00723 | 964 | 1719 | PROBABLE ATP-DEPENDENT TRANSPORTER YCF16 |
| 315 | 316 | RXN01995 | VV0182 | 2139 | 3476 | PUTATIVE 3-(3-HYDROXYPHENYL) PROPIONATE TRANSPORT |
| | | | | | | PROTEIN |
| 317 | 318 | F RXA01995 | GR00584 | 1362 | 2015 | PUTATIVE 3-(3-HYDROXYPHENYL) PROPIONATE TRANSPORT |
| | | | | | | PROTEIN |
| 319 | 320 | RXA01188 | GR00339 | 1585 | 482 | PUTATIVE TRANSPORT PROTEIN SGAT |
| 321 | 322 | RXA01972 | GR00569 | 2116 | 1523 | QUATERNARY AMINE TRANSPORTER |
| 323 | 324 | RXA00311 | GR00053 | 1592 | 738 | SHIKIMATE TRANSPORTER |
| 325 | 326 | RXA00312 | GR00053 | 2066 | 1641 | SHIKIMATE TRANSPORTER |
| 327 | 328 | RXN01411 | VV0050 | 26015 | 26779 | SHIKIMATE TRANSPORTER |
| 329 | 330 | F RXA01411 | GR00412 | 1 | 327 | SHIKIMATE TRANSPORTER |
| 331 | 332 | RXA01900 | GR00544 | 2822 | 4120 | SHIKIMATE TRANSPORTER |
| 333 | 334 | RXA02507 | GR00720 | 19760 | 21160 | SHIKIMATE TRANSPORTER |
| 335 | 336 | RXA00445 | GR00107 | 21 | 932 | SN-GLYCEROL-3-PHOSPHATE TRANSPORT ATP-BINDING PROTEIN |
| | | | | | | UGPC |
| 337 | 338 | RXA02353 | GR00682 | 6 | 473 | SN-GLYCEROL-3-PHOSPHATE TRANSPORT SYSTEM PERMASE |
| | | | | | | PROTEIN UGPA |
| 339 | 340 | RXA01297 | GR00374 | 826 | 29 | SN-GLYCEROL-3-PHOSPHATE TRANSPORT SYSTEM PERMEASE |
| | | | | | | PROTEIN |
| 341 | 342 | RXS00088 | VV0027 | 2 | 877 | FERRIC ANGUIBACTIN-BINDING PROTEIN PRECURSOR |
| 343 | 344 | RXS00372 | VV0226 | 3456 | 2380 | PERIPLASMIC-IRON-BINDING PROTEIN SHIB |
| 345 | 346 | RXS02590 | VV0098 | 15313 | 16248 | MALIC ACID TRANSPORT PROTEIN |
| 347 | 348 | RXS00758 | VV0139 | 26428 | 24827 | PERIPLASMIC OLIGOPEPTIDE-BINDING PROTEIN PRECURSOR |
| 349 | 350 | RXS01346 | VV0123 | 5120 | 6694 | PERIPLASMIC OLIGOPEPTIDE-BINDING PROTEIN PRECURSOR |
| 351 | 352 | RXS00912 | VV0339 | 552 | 280 | potassium efflux system protein phaF |
| 353 | 354 | RXS00453 | VV0076 | 1173 | 3521 | Drug Transporter |
| 355 | 356 | RXS00932 | VV0171 | 13120 | 13593 | Drug Transporter |
| 357 | 358 | RXS00479 | VV0086 | 42008 | 39819 | Drug Transporter |
| 359 | 360 | RXS02586 | VV0098 | 19854 | 20123 | Drug Transporter |
| 361 | 362 | RXS02587 | VV0098 | 17807 | 19897 | Drug Transporter |
| 363 | 364 | RXS03042 | VV0018 | 2440 | 1835 | Drug Transporter |
| 365 | 366 | RXS03075 | VV0042 | 2491 | 3216 | Drug Transporter |
| 367 | 368 | RXS03124 | VV0108 | 4 | 963 | Drug Transporter |
| 369 | 370 | RXS03125 | VV0108 | 972 | 1142 | Drug Transporter |

Channel Proteins

| | |
|---|---|
| Nucleic | Amino |
| Acid | Acid |

| | | | | |
|---|---|---|---|---|
| SEQ ID | SEQ ID | Identification | NT | NT |

| | | | | | | |
|---|---|---|---|---|---|---|
| NO | NO | Code | Contig. | Start | Stop | Function |

| | | | | | | |
|---|---|---|---|---|---|---|
| 371 | 372 | RXA00596 | GR00159 | 335 | 787 | potassium efflux system protein phaE |
| 373 | 374 | RXA02079 | GR00628 | 9034 | 9648 | CATION EFFLUX SYSTEM PROTEIN CZCD |
| 375 | 376 | RXA01303 | GR00376 | 1724 | 390 | NITRITE EXTRUSION PROTEIN |
| 377 | 378 | RXA02079 | GR00628 | 9034 | 9648 | CATION EFFLUX SYSTEM PROTEIN CZCD |
| 379 | 380 | RXN00832 | VV0180 | 3133 | 4182 | CALCIUM/PROTON ANTIPORTER |
| 381 | 382 | F RXA00832 | GR00224 | 2239 | 1685 | CALCIUM/PROTON ANTIPORTER |
| 383 | 384 | RXN00378 | VV0223 | 8027 | 5418 | Cation transport ATPases |
| 385 | 386 | F RXA00378 | GR00081 | 3271 | 1499 | Cation transport ATPases |
| 387 | 388 | RXA00942 | GR00257 | 2406 | 2203 | CATION-TRANSPORTING ATPASE PACS (EC 3.6.1.-) |
| 389 | 390 | RXN01338 | VV0032 | 2 | 1903 | CATION-TRANSPORTING ATPASE PACS (EC 3.6.1.-) |
| 391 | 392 | F RXA01338 | GR00389 | 6964 | 5087 | CATION-TRANSPORTING ATPASE PACS (EC 3.6.1.-) |
| 393 | 394 | RXA01625 | GR00452 | 3850 | 3650 | CATION-TRANSPORTING ATPASE PACS (EC 3.6.1.-) |
| 395 | 396 | RXA02220 | GR00651 | 3205 | 5880 | CATION-TRANSPORTING ATPASE PMA1 (EC 3.6.1.-) |
| 397 | 398 | RXN00980 | VV0149 | 2635 | 4428 | CATION-TRANSPORTING P-TYPE ATPASE B (EC 3.6.1.-) |
| 399 | 400 | F RXA00980 | GR00276 | 2648 | 3286 | CATION-TRANSPORTING P-TYPE ATPASE B (EC 3.6.1.-) |
| 401 | 402 | RXN02348 | VV0078 | 6027 | 7910 | KUP SYSTEM POTASSIUM UPTAKE PROTEIN |
| 403 | 404 | F RXA02348 | GR00677 | 1719 | 586 | KUP SYSTEM POTASSIUM UPTAKE PROTEIN |
| 405 | 406 | F RXA02344 | GR00676 | 682 | 5 | KUP SYSTEM POTASSIUM UPTAKE PROTEIN |
| 407 | 408 | RXN00960 | VV0075 | 1139 | 105 | PROTON/SODIUM-GLUTAMATE SYMPORT PROTEIN |
| 409 | 410 | F RXA00960 | GR00266 | 563 | 105 | PROTON/SODIUM-GLUTAMATE SYMPORT PROTEIN |
| 411 | 412 | RXA01070 | GR00299 | 2089 | 704 | PROTON/SODIUM-GLUTAMATE SYMPORT PROTEIN |
| 413 | 414 | RXA02628 | GR00748 | 6 | 410 | LARGE CONDUCTANCE MECHANOSENSITIVE CHANNEL |
| 415 | 416 | RXN03164 | VV0277 | 1586 | 2455 | POTASSIUM CHANNEL BETA SUBUNIT |
| 417 | 418 | F RXA01395 | GR00408 | 6106 | 5021 | POTASSIUM CHANNEL BETA SUBUNIT |

Other membrane proteins

| | |
|---|---|
| Nucleic | Amino |
| Acid | Acid |

| | | | | |
|---|---|---|---|---|
| SEQ ID | SEQ ID | Identification | NT | NT |

| | | | | | | |
|---|---|---|---|---|---|---|
| NO | NO | Code | Contig. | Start | Stop | Function |

| | | | | | | |
|---|---|---|---|---|---|---|
| 419 | 420 | RXA02597 | GR00742 | 2329 | 542 | OUTER MEMBRANE USHER PROTEIN FIMC PRECURSOR |
| 421 | 422 | RXA01454 | GR00420 | 270 | 4 | integral membrane protein |
| 423 | 424 | RXA01455 | GR00420 | 745 | 284 | integral membrane protein |
| 425 | 426 | RXA02684 | GR00754 | 8923 | 8060 | MEMBRANE-BOUND PROTEIN LYTR |
| 427 | 428 | RXN02391 | VV0176 | 3525 | 3923 | (U59457 Pseudomonas aeruginosa ankyrin (ankB) gene, |
| | | | | | | complete cds [Pseudomonas aeruginosa] |
| 429 | 430 | RXN02549 | VV0098 | 3165 | 5867 | PUTATIVE INTEGRAL MEMBRANE PROTEIN |
| 431 | 432 | RXN00808 | VV0009 | 63243 | 64700 | PUTATIVE MEMBRANE PROTEIN |
| 433 | 434 | RXS01425 | VV0050 | 2679 | 3563 | 60 KD INNER-MEMBRANE PROTEIN |
| 435 | 436 | RXS01658 | VV0010 | 44183 | 42351 | membrane protein |
| 437 | 438 | RXS01677 | VV0179 | 12923 | 12180 | membrane protein |
| 439 | 440 | RXS02932 | VV0176 | 23391 | 24362 | Membrane Spanning Protein |
| 441 | 442 | F RXA02402 | GR00700 | 747 | 4 | (AF027868) putative transporter [Bacillius subtilis] |
| 443 | 444 | RXS00654 | VV0109 | 6289 | 5024 | 6O KD INNER-MEMBRANE PROTEIN |

The application's sequence listing, which the Patent Office published only in electronic form, follows.

SEQUENCE LISTING (446 sequences)

SEQ ID NO: 1 - DNA, 894 bp, Corynebacterium glutamicum
  CDS (101)..(871): RXA00775
tcatcatcgctgtcctgaacattggcgcacgaatcatctccgccaagttctctgtcaagcaataataatctcagaaaatacaacaggagtatctaaagcgatgtcgaagctcaagctcaatgatgtcaacatctactacggtgatttccacgcagtgcagaacgtgaacctcgaggttcctgcacgctctgtcaccgcattcatcggaccatccggctgtggcaagtccacagttctccgctccatcaatcgtatgcacgaggtcaccccaggtgcatacgtcaagggcgagatccttctcgacggcgagaacatctacggctccaagatcgacccagttgcagtccgtaacaccatcggcatggtcttccagaaggctaacccattcccaaccatgtccatcgaggacaacgtggttgcaggtctgaagctttccggcgagaagaacaagaagaagctcaaggaagttgctgagaagtctcttcgtggcgcaaacctgtgggaagaggttaaggatcgtctggacaagccaggcggcggcctctccggtggtcagcagcagcgtctgtgcatcgctcgcgcgatcgcggttgagccagaaatcctcctcatggacgagccttgctccgcgcttgacccaatctcaaccctggctgtggaggaccttatccacgagctgaaggaagagttcaccatcgtcatcgtgacccacaacatgcagcaggctgcacgtgtgtccgatcagaccgcgttctactccctggaggcgaccggtaggccaggtcgtctggttgaaatcggacctaccaagaagatcttcgaaaacccagatcagaaggaaaccgaagattacatctccggccgcttcggataaatcgaagaattaaagccact

SEQ ID NO: 2 - protein, 257 aa, Corynebacterium glutamicum
MSKLKLNDVNIYYGDFHAVQNVNLEVPARSVTAFIGPSGCGKSTVLRSINRMHEVTPGAYVKGEILLDGENIYGSKIDPVAVRNTIGMVFQKANPFPTMSIEDNVVAGLKLSGEKNKKKLKEVAEKSLRGANLWEEVKDRLDKPGGGLSGGQQQRLCIARAIAVEPEILLMDEPCSALDPISTLAVEDLIHELKEEFTIVIVTHNMQQAARVSDQTAFYSLEATGRPGRLVEIGPTKKIFENPDQKETEDYISGRFG

SEQ ID NO: 3 - DNA, 1044 bp, Corynebacterium glutamicum
  CDS (101)..(1021): RXA00776
cgtacatctccgccggcctcgtgctgttcgcccttaccttcatcgtcaacgctggcgctcgcgccatggttaaccgcggaaagtagaaggggacaaaatcatgactaacaatgttgttactccgcgcatggatgagcctttaaagaagagctcagccttcaccgacatctcctccagccgtaagaccaccaacaccgcagcaaccgtcatcatttatggtgcgatgctcatcgcagctgtgccactggtttgggtgctgtggaccgtgatctctcgaggcatcgctccgatcctcactgctgattggtggtccacctcccaggctggcgtcatgctgatgctgccaggcggcggtgcagctcacgccatgatcggtaccttcatgcaggcggtagtcacctcggtgatttccattccaatcggtatcttcaccgcaatctacttggtggaatactccaacggtaaccgtctcggacgcttgaccaccttcatggttgacatcctcaccggtgttccttccatcgttgcggcactgttcgtgtactccttgtggatcgtgctcttcggcttcgaccgctccggcttcgcagtgtccctgtcactggtgattttgatggttccagtgatcatccgaaacaccgaagaaatgctccgcgttgttcctcaggatctgcgtgaagcgtcctacgcactgggcgtgccaaagtggaagaccatcgcaaagatcgttctcccaaccgcactgtccggtatcgtcaccggcgtcatgctcgcagtcgctcgtgtcatgggtgagtccgcaccagttctggtcttggttggttcctcccaggccatcaactggaacccattcggcggtccgcaggcttcccttccactgatgatgcttgatatgtacaaggccggcaccgcaccagcaacgctggacaagctgtggggcgcagccctcaccctggtgctcatcatcgctgtcctgaacattggcgcacgaatcatctccgccaagttctctgtcaagcaataataatctcagaaaatacaaca

SEQ ID NO: 4 - protein, 307 aa, Corynebacterium glutamicum
MTNNVVTPRMDEPLKKSSAFTDISSSRKTTNTAATVIIYGAMLIAAVPLVWVLWTVISRGIAPILTADWWSTSQAGVMLMLPGGGAAHAMIGTFMQAVVTSVISIPIGIFTAIYLVEYSNGNRLGRLTTFMVDILTGVPSIVAALFVYSLWIVLFGFDRSGFAVSLSLVILMVPVIIRNTEEMLRVVPQDLREASYALGVPKWKTIAKIVLPTALSGIVTGVMLAVARVMGESAPVLVLVGSSQAINWNPFGGPQASLPLMMLDMYKAGTAPATLDKLWGAALTLVLIIAVLNIGARIISAKFSVKQ

SEQ ID NO: 5 - DNA, 1188 bp, Corynebacterium glutamicum
  CDS (101)..(1165): RXA00777
ttaagtgaatcgggcgccctctcccagcaattgagggtagggcgcccgattttactaacaagctttttatcaatacgccagttaaggaaataaaccaccaatggccactaatgagtcagtctcggagaagcaacgcctggatgcaaccagggtgcaggcacatcctgtagcagttaatgcgaactcctctcagaccaagccttcaaagaagattgtcgccgaaggtggcggaagcgttaagcgtcccggcgatcgcatcttcgaagtcctatccaccgcttctgcagcaatcattactgcgataatcattgccattgcggcgttccttatctggcgtgctgttcccgccttgatgcgaaatgctgaaggtattggcggattcttcacttattcaggcgcttggaacaccaccgacattgatgcaatgtacttcggtattccaaacctgctagctgcaacacttctcatctctgtcatcgcactgatcatcgccatgccgattgctcttggtattgcgatcttcttgtccaactactcaccaaagcgcctggttaagccacttggctacatggtggacatgctggctgctgtgccttccatcgtctacggcctttggggctggcaggtgctcggaccagctctgtccggtttctacacctggattgaaagctggggcggaagcttcttcctcttcgctacttaccaaaactcaccttcttttgctaccggccgtaacatgctcaccggtggcatcgtgctcgcagtgatgatccttcctgttatcgaagcaaccgcacgtgaagttttcatacagactccaaagggccacattgaatctgctcttgcacttggcgcaacccgctgggaagtcgttcgtttgacggttctcccattcggaatgtccggctacgtttccggcgcgatgctcggcctcggccgcgcactgggtgagaccatggcgctatacatggttgtttctccatcctcggcgttccgcttctcgcttttcgatggcggtaccaccttcgcaacggccatcgccaatgccgctccagaattcaacgacaacacccgcgcaggcgcgtacatctccgccggcctcgtgctgttcgcccttaccttcatcgtcaacgctggcgctcgcgccatggttaaccgcggaaagtagaaggggacaaaatcatgact

SEQ ID NO: 6 - protein, 355 aa, Corynebacterium glutamicum
MATNESVSEKQRLDATRVQAHPVAVNANSSQTKPSKKIVAEGGGSVKRPGDRIFEVLSTASAAIITAIIIAIAAFLIWRAVPALMRNAEGIGGFFTYSGAWNTTDIDAMYFGIPNLLAATLLISVIALIIAMPIALGIAIFLSNYSPKRLVKPLGYMVDMLAAVPSIVYGLWGWQVLGPALSGFYTWIESWGGSFFLFATYQNSPSFATGRNMLTGGIVLAVMILPVIEATAREVFIQTPKGHIESALALGATRWEVVRLTVLPFGMSGYVSGAMLGLGRALGETMALYMVVSPSSAFRFSLFDGGTTFATAIANAAPEFNDNTRAGAYISAGLVLFALTFIVNAGARAMVNRGK

SEQ ID NO: 7 - DNA, 777 bp, Corynebacterium glutamicum
  CDS (101)..(754): RXA00774
attatcgccttatagtgttgccatgcgtactgcatatagacagcaattggatgaattcgcacacaatctaatcattttgtgtgatctaactaaggagtgcatggataaggcgactgatgccctcctgcgcacttctttggcatcggcagaaagcgctttaggcaatgcagaaaagcttgaagagcttcgtactggatgcgagtctcaagccgtcgaacttttggcgcttgaaactcctgtagcccgtgatcttcgccaggttgtctcctccatctacatcgtcgaggaaattacccgtatgggtgctctggcaatgcacgtggctaattccgtgcgccgccgttaccccgatccggtgatcccggaggacatgcgtggctatttcaaggagatggcccgcctcgcagctgacatgacagatcatattcgtcagatcctcattgatcctgaaccagatcttgccctagagatggctaaaagcgatgacgcggtggatgatctgcatcagcacatcatgcgtattctcacgctgcgtccttggcctcacgacaccaagagcgcggttgatttgacgctgctttcccgcttctacgagcgttacgccgatcacacggtaaacgtggccgcccgtatcatttacctgtccaccgggctgcacccggaggagtacatggaaaagcgcgagcaacaaagggccgatgccgacatggagaagcgctgggccgagctggagcggcagttccgcaccagcgagtaaaaagctgcttctcgacgcta

SEQ ID NO: 8 - protein, 218 aa, Corynebacterium glutamicum
MDKATDALLRTSLASAESALGNAEKLEELRTGCESQAVELLALETPVARDLRQVVSSIYIVEEITRMGALAMHVANSVRRRYPDPVIPEDMRGYFKEMARLAADMTDHIRQILIDPEPDLALEMAKSDDAVDDLHQHIMRILTLRPWPHDTKSAVDLTLLSRFYERYADHTVNVAARIIYLSTGLHPEEYMEKREQQRADADMEKRWAELERQFRTSE

SEQ ID NO: 9 - DNA, 1695 bp, Corynebacterium glutamicum
  CDS (101)..(1672): RXA00204
tcaacggcggtttcccaaaaggcggccgcaaaggcagcaaaagcagcccaaaaagcagccgcgaaagccgcacagaacacgcaacacgaggtgagcctagatggtgaactctgaacaagcgcttcatcagcatgatcctgcaccaatccttcagttggataaagtctccaagtcgtttggcccagtcaacgtcattaatcaagtgagcatcgatgttcgccctggcagggtgcttgcgctgttgggtgaaaatggtgcgggtaaatctacgctgatcaagatgatgtcgggtgtgtatcagcctgatggcgggcagattttggtggatggaaagcccacgactttgcctgatacgaaaactgctgagtcttttggcatcgctacgattcaccaggaattgaatctggtgcccacgatgacggtggcggaaaacgtcatgctgggccgcactcctcggaagtggggtttggtcaatttcaaacatttgcgcaggcaggcacaggcggcgctggatctcatcggcgtggatgtggatctgaatgctcaggtgggttctttaggaatcgctaggcagcagatggtggagatcgccaaggcgttgtccatgaatgcgcggatattgattttggatgagcccactgcagcgttgactggtcgtgaaattgatcagttattcaaagtggtggatcagctgaaagaaaaaggcgtggccatggtgtttatttcgcaccacttggatgagatcgcgcgcatcggcgataccgtctctgtgctgcgtgatggccagttcatcgcggagctgccagcggatactgatgaagatgagctggtgcggctgatggtgggtcgtagcattgaaaaccagtatccgcgtagtgcgccagagatcgggcagccactgttggaggtgaaaaacctcaacgcggagggccggttcacggatatttccttgactgttcgcgctggtgaagtcgtaggccttgccggtcttgtgggtgctggtcgcacggaagtggttcgctcgattgctggcgtggacaaagttgattccggtgaggtgatcgttgctggcaagaaattgcgcggcggcgatatttccgaggctattaaaaacggcatcgggcacattccggaagatcgaaaagcccagggcctggtgctggggtcgtctgtggaggacaacctgggattggcgactttggcgtcgacagcccgcgcaggtttggtcgatcgatcaggacagcacaaacgagccgccgaggtcgcggaaaaactccgcatccggatggcaagcctcaaacaaccgattagcgatttatcgggcggcaatcagcaaaaggccgtgttcggccgctgggtgcttgccgggtcaaacgtgctgcttctcgacgaaccgacccgtggcgttgacgtcggcgcgaaggtggaaatttacaacatcattaatgagatgacggaaaaaggtggcgctgtgctcatggtgtcatcggagcttcccgaagtcttgggcatggctgatcgcattttggtcatgtctggtggacgcatcgcaggcgaactgccagcgaagggaacaacccaggacgatgtcatggctctagctgtttcccaggtggatgattccatcaccgaggaagctgctgcagaaatcgaaaacacaaaggaggaccgttgagcaccgccgtagtttcacag

SEQ ID NO: 10 - protein, 524 aa, Corynebacterium glutamicum
MVNSEQALHQHDPAPILQLDKVSKSFGPVNVINQVSIDVRPGRVLALLGENGAGKSTLIKMMSGVYQPDGGQILVDGKPTTLPDTKTAESFGIATIHQELNLVPTMTVAENVMLGRTPRKWGLVNFKHLRRQAQAALDLIGVDVDLNAQVGSLGIARQQMVEIAKALSMNARILILDEPTAALTGREIDQLFKVVDQLKEKGVAMVFISHHLDEIARIGDTVSVLRDGQFIAELPADTDEDELVRLMVGRSIENQYPRSAPEIGQPLLEVKNLNAEGRFTDISLTVRAGEVVGLAGLVGAGRTEVVRSIAGVDKVDSGEVIVAGKKLRGGDISEAIKNGIGHIPEDRKAQGLVLGSSVEDNLGLATLASTARAGLVDRSGQHKRAAEVAEKLRIRMASLKQPISDLSGGNQQKAVFGRWVLAGSNVLLLDEPTRGVDVGAKVEIYNIINEMTEKGGAVLMVSSELPEVLGMADRILVMSGGRIAGELPAKGTTQDDVMALAVSQVDDSITEEAAAEIENTKEDR

SEQ ID NO: 11 - DNA, 882 bp, Corynebacterium glutamicum
  CDS (101)..(859): RXA02438
caggttggaaccctgactggttcatgttcttcctcggcggcaccctacttctggctgttttgctcaatcaccgattcgagcgtttcaacaaggagcgatcatgacagacctcattcaactccgcgaagtatccaaaaaatacggtgctttccaggccctcaacgacatcaatttgaacgtccgcgcaggcgaagtcacctgtgttctgggtgacaacggcgccggaaaatccaccctcatcaagattctctccggcctgcatcccgccacctccggcgaagtaatcgtggccggcgatgtagtgaattttggatccccccgcgacgccctcgacgccggaatcgccaccgtctaccaagacctagcagtggtcgggcagatgagtgtgtggcgcaacttcttcctcggccaggaactcaccggccgatttggcgttctgaaacaagaagaaatgcgccgcatcaccgacgaacaactccgcgaaatgggcatcgaactccgcgatgtcgacgtccctgtggcctccctttcaggtggtcaacgccaagttgtcgccatcgcccgcgccatctacttcggcgcgcgcgtcctcattttggacgagcccaccgcagcgctgggcgtgaaacaatctggcatggtgctgcgctttattgccgcagcacgcgaccgggggatcggcgtcattttcatcacgcacaacccccaccacgcctaccttgtcggtgatcacttcatcctgctcaacttaggcaagcaggtcatggacaaatcccgcgcagaagtcgagctggaagaactcaccctcgccatgtccggcggcggcgagctcgactcactcagccacgaattgaagcgttaacctacttcttcttttcgctc

SEQ ID NO: 12 - protein, 253 aa, Corynebacterium glutamicum
MTDLIQLREVSKKYGAFQALNDINLNVRAGEVTCVLGDNGAGKSTLIKILSGLHPATSGEVIVAGDVVNFGSPRDALDAGIATVYQDLAVVGQMSVWRNFFLGQELTGRFGVLKQEEMRRITDEQLREMGIELRDVDVPVASLSGGQRQVVAIARAIYFGARVLILDEPTAALGVKQSGMVLRFIAAARDRGIGVIFITHNPHHAYLVGDHFILLNLGKQVMDKSRAEVELEELTLAMSGGGELDSLSHELKR

SEQ ID NO: 13 - DNA, 1035 bp, Corynebacterium glutamicum
  CDS (101)..(1012): RXA00203
aggaagctgctgcagaaatcgaaaacacaaaggaggaccgttgagcaccgccgtagtttcacagaagaagtccacaacggcatccaaaattggacattggatgctcaataacggtgcgttggtggggctgattgcactgtgtgttggactttttattgcaacaccccactttctcaccattcctaacctgatcaacatcggtatccaatcggcgacggtggcgatcctggcgttcggcatgaccttcgtcatcgttaccgcaggcattgatttgtctgtgggatcagtggctgcgttgggtgcgatgacctcggcgtatttcttcgcggaagttggtttgccgggctggatcacgctgctgattggcctgttcatcggattgttggcgggtgcgatctctggcatttctattgcttatggcaagttgcctgcgtttattgccaccttggccatgatgtcgatcgccaggggaatcaccttggtcatttcccaaggctcaccaattcccagtgcaccagctgtgaacgctttggggcgcacctactttggcatcccgatgccgattctgatgatggcactggctggcattgtgtgttggtttattttgagccgcaccgtgctgggacggtccatgtacgccattggcggaaacatggaagcagcccgactatctggtctgccagtgaagaaaatcctggtcatggtctatgcactggctggtgtgtatgcagcacttgcgggtctggtcatgacgggacgcttgtcgtccgcgcagccgcaggcaggcgtgggatacgaactcgatgcgattgccgccgtggtcattggtggtgcgtcacttgctggcggaaccggaaaagcaacgggcactttgattggtgccatcttgttggccgtgatccgcaatggcttgaacattttgaacgtgtcctcgttctggcagcagattgtcatcggttgtgtcatcgcgcttgcggtgggcttcgatgtcatccgaaacaaaacctctaagtaattcctgaaaggaaattttca

SEQ ID NO: 14 - protein, 304 aa, Corynebacterium glutamicum
MLNNGALVGLIALCVGLFIATPHFLTIPNLINIGIQSATVAILAFGMTFVIVTAGIDLSVGSVAALGAMTSAYFFAEVGLPGWITLLIGLFIGLLAGAISGISIAYGKLPAFIATLAMMSIARGITLVISQGSPIPSAPAVNALGRTYFGIPMPILMMALAGIVCWFILSRTVLGRSMYAIGGNMEAARLSGLPVKKILVMVYALAGVYAALAGLVMTGRLSSAQPQAGVGYELDAIAAVVIGGASLAGGTGKATGTLIGAILLAVIRNGLNILNVSSFWQQIVIGCVIALAVGFDVIRNKTSK

SEQ ID NO: 15 - DNA, 1011 bp, Corynebacterium glutamicum
  CDS (101)..(988): RXA00270
tggagactgcaactgagttcacctacgtgatcaacgaagatgcagcagagcgccagggcgtggagatccctcaagagattttggataaggccgaacgcgtatgatcggcgcttttgagttcggattgttgtacggagttgtcgcattgggcgtctatttgacgttccgtgtgctcaactttcccgacctcaccgttgacggcagcctgaccactggcgcggcaacagctgcgacagctcttatgtctggctggcctccccttatggctactgccgctggtttcgttactggctttatcgctggcatgatcaccggtttgctgcacaccaagggcaagatcgatggtttgctcgcaggtattttgaccatgattgcgttgtggtcggttaacttgcgcatcatgggtggcgcgaacgtgccattgttgcgcaccgataacctcttcaccccgcttcgcgacgccggcctcctcggcacatgggcaggcccggcgatcctcgccgttgcagtgggaattttgggactcatcgtcatctggttcctcaacactgatatcggactgtcgctgcgatccaccggcgacaacgggccgatggtgcagtcctttggtgtttcaacggatttcaccaaaatcctcaccatctccctgtccaatggttttgttggtcttgccggtgcactcatcgctcagtaccagggcttcgcagatatttcgatgggtattggcctcatcgtgatcggtctcgcatcggttattttgggccaggccatcttcggtcagcgtcgcgtgtggttggctgtgttggctgtcatcgtcggtgccatcgcgtaccgcctgatcattttcgcagcactgcgcgttggccttgaccccaacgatatgaaggcaatttctgcgatcttggtggttgtcgccatgctgctgccgaggtggcgtgcgaagttctccaaggcaccgaagcctaagcaaccagtagcagtggaggcttaagacatgttatccatcaacgg

SEQ ID NO: 16 - protein, 296 aa, Corynebacterium glutamicum
MIGAFEFGLLYGVVALGVYLTFRVLNFPDLTVDGSLTTGAATAATALMSGWPPLMATAAGFVTGFIAGMITGLLHTKGKIDGLLAGILTMIALWSVNLRIMGGANVPLLRTDNLFTPLRDAGLLGTWAGPAILAVAVGILGLIVIWFLNTDIGLSLRSTGDNGPMVQSFGVSTDFTKILTISLSNGFVGLAGALIAQYQGFADISMGIGLIVIGLASVILGQAIFGQRRVWLAVLAVIVGAIAYRLIIFAALRVGLDPNDMKAISAILVVVAMLLPRWRAKFSKAPKPKQPVAVEA

SEQ ID NO: 17 - DNA, 1146 bp, Corynebacterium glutamicum
  CDS (101)..(1123): RXA02439
gcaccactgttggtggcggacgacccgtgtacacaggaccagccattgtggatgccaccaacgttgatgtcattgctgaagccgttggggagggtctgcgatgacaaaaatcaagagtggggaggcgtcgacaagcattgttgagcgcgccttaaagcgccccgaactgaccagcctgcttggcgccgtgcttgtttttacgctgtttatggtggtcgcgccggcatttaggtcatgggattcgatggcgaccgtgctgtatgcgagttccacgatcggcatcatggcggttgccgtgggcctgctgatgatcgctgatgaattcgacctgtccaccggcgttgccgtgacaactgcagcgctggcggcctcgatgtttagctataacctgtggctgaacacctgggtgggcgcgctgattgcattggtgatttcgctggccatcggctttttcaacggctttttggtagtgaaaaccaagattgcatccttcctgatcacccttgccactttccttatgctgcagggtattaatctggcggtcaccaagctgatttccggcaccgtggccacgccaaccatcgcggatatggaaggttttccttcagcgcgtgcggtgtttgccagctcgattcccatctttggtgtgaatattcgcatcactgttttttggtggctgctgtttgttatcgtcggcacttttgtgttgtttaagacgcgcatcggcaactggatttttgcggtcggtggcgatgaagaggcagctcgcgcagtcggcgttcccgtgcgtggcgtgaaaatcggcctgttcatgttcgttggttttgccgcctggtttgtgggcatgcacaacctgttcctctttgattcgattcaggctggtcaaggcgtgggtaatgagttcctctacatcatcgctgcggtgatcggaggcatctccatgactggtggccgcggaacagtggtgggcacaatgattggtgcactcatctttggaatgaccaaccaaggcattgtttatgcaggttggaaccctgactggttcatgttcttcctcggcggcaccctacttctggctgttttgctcaatcaccgattcgagcgtttcaacaaggagcgatcatgacagacctcattcaactccgc

SEQ ID NO: 18 - protein, 341 aa, Corynebacterium glutamicum
MTKIKSGEASTSIVERALKRPELTSLLGAVLVFTLFMVVAPAFRSWDSMATVLYASSTIGIMAVAVGLLMIADEFDLSTGVAVTTAALAASMFSYNLWLNTWVGALIALVISLAIGFFNGFLVVKTKIASFLITLATFLMLQGINLAVTKLISGTVATPTIADMEGFPSARAVFASSIPIFGVNIRITVFWWLLFVIVGTFVLFKTRIGNWIFAVGGDEEAARAVGVPVRGVKIGLFMFVGFAAWFVGMHNLFLFDSIQAGQGVGNEFLYIIAAVIGGISMTGGRGTVVGTMIGALIFGMTNQGIVYAGWNPDWFMFFLGGTLLLAVLLNHRFERFNKERS

SEQ ID NO: 19 - DNA, 746 bp, Corynebacterium glutamicum
  CDS (1)..(723): RXN02994
atcaagatgacgggagtgcaaaaatacttcggcgactttcatgcccttacggatattgatcttgaaattcccagaggacaagttgtcgtcgtacttggaccatccggatccggcaagtcaaccctttgccgcacgatcaaccgtctcgaaaccatcgaggaaggcaccatcgaaatcgatggaaaggttctcccagaagaaggtaaaggcttagccaatctccgcgccgatgtcggaatggtattccagtccttcaacctcttcccccacctcaccatcaaagacaacgtcactcttgcacccatcaaagtgcgaaagatgaaaaagtctgaagccgaaaagcttgcgatgagcctgttggaacgcgtcggcatcgcaaaccaagctgataaatatccggcgcaactgtccggcggtcagcaacagcgtgtggccatcgcgcgcgcacttgcgatgaacccaaagatcatgcttttcgacgagcccacctccgcccttgaccctgaaatggtcaacgaagtgttggacgtcatggcaagccttgccaaggaaggcatgacgatggtgtgtgttacccacgagatgggattcgcacgcaaagcagccgatcgtgtgttgttcatggcggatgggctcattgtggaagatacggaaccagattccttcttcaccaaccctaagtctgatcgtgcaaaagacttcctcggcaagatccttgcccactagtttttggctgcgcctctatc

SEQ ID NO: 20 - protein, 241 aa, Corynebacterium glutamicum
IKMTGVQKYFGDFHALTDIDLEIPRGQVVVVLGPSGSGKSTLCRTINRLETIEEGTIEIDGKVLPEEGKGLANLRADVGMVFQSFNLFPHLTIKDNVTLAPIKVRKMKKSEAEKLAMSLLERVGIANQADKYPAQLSGGQQQRVAIARALAMNPKIMLFDEPTSALDPEMVNEVLDVMASLAKEGMTMVCVTHEMGFARKAADRVLFMADGLIVEDTEPDSFFTNPKSDRAKDFLGKILAH

SEQ ID NO: 21 - DNA, 1790 bp, Corynebacterium glutamicum
  CDS (1)..(1767): FRXA01245
gcctcctgggtcaccaccctggggctgggcgggttccacctagatttctggtgggaactggccctgctggtgaccataatgctgttgggccactggctggagatgcgcgctcttggtgcagcctcctccgcgcttgacgcgctggcagcgctcctgcccgatgaggccgagaaggtcgtcgacgggaccacccgcaccgtagcgatctcagagctggccgtcgacgatgtcgtgctggtccgagcaggtgcccgcgtcccggccgacgggaccatcatggacggagcggccgaattcgatgaggccatgatcaccggcgaatcccgacccgtctaccgggataccggtgagaccgtggtggccggcaccgtggccaccgacaacaccgtccgtatccgggtggaggccaccggtggggacaccgccctggcaggcatccagcgcatggtcgccgacgcccaggcctcctcctcccgggcccaggccctggccgatcgagccgcagccttactgttctggttcgccctgatcacggccctgatcaccgccgtggtctggaccatcatcggcagccccgacgatgccgtggtccgcgcggtgaccgtgctgatcatcgcctgcccgcacgccctgggcctggccatcccgctggtcatcgcgatctcctccgagcgcgccgcgaaatccggggtgctcatcaaggaccgcatggcactcgagcacatgcgcaccatcgacgtcgtcttgttcgataagaccggcaccctgaccgaaggcgcacacgccgtcaccggcgtggctccggccacgggtatcgccgagggtgagctgctggccctggccgccgccgctgaggccgatagtgagcaccccgtggcccgcgcgatcgtgactgccgcggccgcacacccggaggcctcgcagcgtcagctgcgcgcaaccggtttcaccgccgcctccggccgcgggatccgggccaccgtcgacggtgccgaaatcctcgtgggcgggccgaacatgctacgcgagttcaatctgaccaccccgggtgagctcgccgacatcaccggttcctgggcacagcgaggtgccggagtgctacatgtcgtccgcgacggtgagatcatcggtgcggtggcagtggaggacaaaatccgccccgaatcccgcgcggcggtacgcgccctgcaggcccgcggggtgaaggtggcgatgatcaccggtgacgccacccaggtcgcccaggcagtgggcaaggatctggggatcgatgaggtcttcgccgaggttctgccgcaggacaaggacaccaaggtcacccagctgcaggagcgcggtctgagcgtggccatggtcggcgacggtgtcaatgacgccccggccctggcccgggccgaggtcggtattgcgattggcgcgggtacagatgtggcgatggagtccgccggggtggtcctggccagtgatgatccccgggccgtgctgtcgatgatcgagctctcccatgccagctaccgcaagatggtccagaacctggtctgggcgaccgggtacaacatcgtggccgttccgctggccgccggtgtgctcgcccctatcggtgtgctgcttcccccggcggcggccgccatcttgatgtccctgtccacgatcatcgtcgccctcaacgcccagctgctacgccggatcgacctggacccggctcacctagctccgaccgacgggaaggaggagaaggctgctgtgagctctgcagcccccgtccgctgactttcaatgcttcatggact

SEQ ID NO: 22 - protein, 589 aa, Corynebacterium glutamicum
ASWVTTLGLGGFHLDFWWELALLVTIMLLGHWLEMRALGAASSALDALAALLPDEAEKVVDGTTRTVAISELAVDDVVLVRAGARVPADGTIMDGAAEFDEAMITGESRPVYRDTGETVVAGTVATDNTVRIRVEATGGDTALAGIQRMVADAQASSSRAQALADRAAALLFWFALITALITAVVWTIIGSPDDAVVRAVTVLIIACPHALGLAIPLVIAISSERAAKSGVLIKDRMALEHMRTIDVVLFDKTGTLTEGAHAVTGVAPATGIAEGELLALAAAAEADSEHPVARAIVTAAAAHPEASQRQLRATGFTAASGRGIRATVDGAEILVGGPNMLREFNLTTPGELADITGSWAQRGAGVLHVVRDGEIIGAVAVEDKIRPESRAAVRALQARGVKVAMITGDATQVAQAVGKDLGIDEVFAEVLPQDKDTKVTQLQERGLSVAMVGDGVNDAPALARAEVGIAIGAGTDVAMESAGVVLASDDPRAVLSMIELSHASYRKMVQNLVWATGYNIVAVPLAAGVLAPIGVLLPPAAAAILMSLSTIIVALNAQLLRRIDLDPAHLAPTDGKEEKAAVSSAAPVR

SEQ ID NO: 23 - DNA, 807 bp, Corynebacterium glutamicum
  CDS (101)..(784): RXA00002
ctgacttcttgggcttcggtgctgcaatatctaggttcacgccccggatggcaccggagaggctgcagacaagctcgctgctgaggattctcacctgcacgtgctgcaccgcgaaggcaagggtggccttcttggcgcttatatcgccggcttcgagtggggcctagagaaggattaccatgttctgtgcgaaatggatgccgacggctcccacgcaccagaacagctccacctcttgcttgaggaaattgaaaagggcgcagatctggtcattggctcccgctacgtaccgggtggagagacagtgaactggcctgccaaccgcgaactgctgtcccgcttgggcaacaagtacatttctgttgccctgggtgccggcatcaatgacatgactgccggctaccgtgctttccggcgtgagctgcttgagcacctcgactttgaggagctttccaacgccggatacatcttccaggtggacgttgccttccgcgccatcaaggatggcttcgatgtccgcgaggttccgatcaccttcaccgagcgcgagcttggtgaatccaagctggacggctcctttgtcaaggattccctgctcgaagtaaccaagtggggagtggctcaccgctccgagcagatcagcgatttcacatcggaagtatccaagatcgcctcccgcacggtcaaggacatggagcttggccctaaggccaccacggccaagaacgctgtaccggacttcgtttccgaagtctctaacctagctaaaggcaccttcaagaagtaactcgatgcccgcggcgtctc

SEQ ID NO: 24 - protein, 228 aa, Corynebacterium glutamicum
VLHREGKGGLLGAYIAGFEWGLEKDYHVLCEMDADGSHAPEQLHLLLEEIEKGADLVIGSRYVPGGETVNWPANRELLSRLGNKYISVALGAGINDMTAGYRAFRRELLEHLDFEELSNAGYIFQVDVAFRAIKDGFDVREVPITFTERELGESKLDGSFVKDSLLEVTKWGVAHRSEQISDFTSEVSKIASRTVKDMELGPKATTAKNAVPDFVSEVSNLAKGTFKK

SEQ ID NO: 25 - DNA, 696 bp, Corynebacterium glutamicum
  CDS (101)..(673): RXA00160
tacaggggtggggttaccccctaaggtggtcacaacttgataacggactggttaataaatggccaatctgaccattttaacctccataaaaaggattctcatgctaaacatcgcacgcaaccgcaacatgaagcgtcgactagcaattgctgctttcgtcgccaccgcaaccgctaccgccaccatggcaccagcatccgcgcaaaccgactacgcaggcctttcctccggcgttgccgacaccgtcgcagaagctgcaggagtcgcaaccaccgccgtcgcaccagccgccaccgtagcgcgcccagcaaacggcaccttcacctcaggattcggaccacgttggggaaccttccacaacggcatcgacatcgcaaactcaatcggcaccccaatctacgccgtcatggccggcactgtcatcagctctggcccagcatccggctatggacagtggatccgcatccagcacgacgacggatccatctccatctacggacacatggaatacctctacgtctccgtcggcgaacgcgtcgcagcaggccaggaaatcgcaggaatgggcagccaaggattctccaccggctcccacctccacttcgagatccacccagacggcgtcaccccagtcgacccacaggcatggctcgcaaaccacggcatctacgtttaagcgctagccgttcgtgggat

SEQ ID NO: 26 - protein, 191 aa, Corynebacterium glutamicum
MLNIARNRNMKRRLAIAAFVATATATATMAPASAQTDYAGLSSGVADTVAEAAGVATTAVAPAATVARPANGTFTSGFGPRWGTFHNGIDIANSIGTPIYAVMAGTVISSGPASGYGQWIRIQHDDGSISIYGHMEYLYVSVGERVAAGQEIAGMGSQGFSTGSHLHFEIHPDGVTPVDPQAWLANHGIYV

SEQ ID NO: 27 - DNA, 1063 bp, Corynebacterium glutamicum
  CDS (90)..(1040): RXA00345
agtgacccatatggcgtatccgaggtctaacgcgattttgcgattttcaataagttttcatgttgacatcctttttcaataagcatttaatggcaggtatgaaaaagcttctttggacactccccatcctcccactggtactagctggctgctcaactggatcagcagattccgcggattccaccaacgctgccggatccaattcccttaaagtggtcacctccacccaggtgtgggctgacgtcgccgaagctgtcgccccagatgtagacattgaagcaattattaccggtggcgacatcgaccctcattccttcgagccttccgctaccgatatggctaaagtttccgaagctgacatcattatcgtcggtggcggcggctatgattcctggctctacggcaccttggaagacgatgatcgcatcatccacgcattggatctctcagagcatgaccacagcgagcatgatgatcacgagcacgaagccgaagaagcccacgaacacgaccacgatgaagagggccacgatcatgacgtcgacaacgagcacgtctggtactccactgaatacgtctctgaggtagctgaagagttcgcagaaaaagtcaccgagcttgatcccgaggcacaggccgatgcaacggctgtgaccaccaagatggacgagctgcacaatcagattcacgatcttccagcagttcgcattgctcagaccgagccgatcgccgatcacattttgtcccactccgacatggtggaatccacccctgagggttaccgcgcaaccacgttgagcgagagcgagccaaccgcagcagatgttgcgtcgttccaggatgcaattaacaacggtgacctcgatgttttgatctacaacccacagtccgcgtcgactgtcgcgaccagcttgaaggatttggcagaagaaaaaggcatcccagttgttgagatctatgagacccctcaaaacaccgagaatttcctcgatgcattcaccaaggcagttgatgatctcaccgctgccactaaccaggtttagaattatttaaatgctgttga

SEQ ID NO: 28 - protein, 317 aa, Corynebacterium glutamicum
MAGMKKLLWTLPILPLVLAGCSTGSADSADSTNAAGSNSLKVVTSTQVWADVAEAVAPDVDIEAIITGGDIDPHSFEPSATDMAKVSEADIIIVGGGGYDSWLYGTLEDDDRIIHALDLSEHDHSEHDDHEHEAEEAHEHDHDEEGHDHDVDNEHVWYSTEYVSEVAEEFAEKVTELDPEAQADATAVTTKMDELHNQIHDLPAVRIAQTEPIADHILSHSDMVESTPEGYRATTLSESEPTAADVASFQDAINNGDLDVLIYNPQSASTVATSLKDLAEEKGIPVVEIYETPQNTENFLDAFTKAVDDLTAATNQV

SEQ ID NO: 29 - DNA, 1020 bp, Corynebacterium glutamicum
  CDS (101)..(997): RXA00413
ctgtacagatcgcggtctatggtgctaatctcctaaatacttgaatgaccatttcatgatccattcacaaaaactttcccaaacaaggacgtatttgaaaatgaaacttcgtcgcatcacaaccaccgccatcgctggcctcttcgccgcaaccgcacttgttgcctgtggctccgattccgatggaagcagcaccactgttgctgaaggcaccgaaggcgtgaccatccgcatcggcaccaccgacgctgcgaaggaagcatggaccgtattcgaagacaaggcagctgaagagggcatcaccctcgacatcgttcctttctctgactactccaccccaaatgaggctcttgcccaggatcagctggacgttaacctcttccagcacctgaagttcctggctgagtacaacgtcggctccggcgcagacctcaccccagttggctccagcgaaatcgtgccactggcactattctggaaggaccacgactccatcgacggcattgacggcgagtccgttgccatccctaacgatccttccaaccagggccgcgccatcaacgttctcgttcaggcaggtctggtcaccctgaagaccccaggtctggtcaccccagctccagtcgatatcgacgaggcagcttccaaggtttccgtcatcccagtcgacgcagctcaggcaccaaccgcttaccaggagggtcgcccagcgatcatcaacaactccttccttgaccgcgcaggcatcgatccaaacctcgcggtcttcgaagatgatcctgagtctgaagaagcagagccatacatcaacgtcttcgtcaccaaggctgaggacaaggacgatgccaacatcgcccgcctcgttgagctgtggcacgacccagaggttctggctgcagtagaccgcgactctgagggcacctccgtcccagttgatcgtccaggagctgaccttcaggaaatccttgatcgccttgaggctgatcaggaaaacgcataatctcttttgagttctttgca

SEQ ID NO: 30 - protein, 299 aa, Corynebacterium glutamicum
MKLRRITTTAIAGLFAATALVACGSDSDGSSTTVAEGTEGVTIRIGTTDAAKEAWTVFEDKAAEEGITLDIVPFSDYSTPNEALAQDQLDVNLFQHLKFLAEYNVGSGADLTPVGSSEIVPLALFWKDHDSIDGIDGESVAIPNDPSNQGRAINVLVQAGLVTLKTPGLVTPAPVDIDEAASKVSVIPVDAAQAPTAYQEGRPAIINNSFLDRAGIDPNLAVFEDDPESEEAEPYINVFVTKAEDKDDANIARLVELWHDPEVLAAVDRDSEGTSVPVDRPGADLQEILDRLEADQENA

SEQ ID NO: 31 - DNA, 771 bp, Corynebacterium glutamicum
  CDS (101)..(748): RXA00482
gcgatttctatgaaattcttcacccatccacaactatctactatacttttagaagtaataactattgagttaatataaacatgaagaaaggatttgctttatgcgcatttcaagcaaacttgtcaccacagcactactcgcagccatttcacttttcgggatatccacggcacaagcccaagacatttttgacggcggacgacttgcaggtggctcctcgcaggtatctaacctaagttcggttcctgaaaacctagcgctgcccgaaattgaaaatagcattgacctagaacgctacaaaggcaagtggtatcaagtcgcagcaattccccaaccattctctttacagtgctcacatgacgttaccgctgattacggcgtgatcgactcggacacaatctctgtaacaaataagtgtggcactttctttgggccttcagttattgaaggcagcgctaaagtagtttccaatgcttcattaaaggttagcttcccaggtattccatttcagagtgaagacaatcaagcaaactaccgcgtgacctatatcgaagatgattattcactagcaatcgtcggcagcccaagccggtcctcaggatttatactatcccgcacgccacagctcagtagtgaccaatggtctcacgttcggaacattacagaggacagtgggtggtggccatgcgcattcattacagtcccagcgacaggtggcttaaacaccgccactccgctctgcacactttaattaacgtagatggtcatcta

SEQ ID NO: 32 - protein, 216 aa, Corynebacterium glutamicum
MRISSKLVTTALLAAISLFGISTAQAQDIFDGGRLAGGSSQVSNLSSVPENLALPEIENSIDLERYKGKWYQVAAIPQPFSLQCSHDVTADYGVIDSDTISVTNKCGTFFGPSVIEGSAKVVSNASLKVSFPGIPFQSEDNQANYRVTYIEDDYSLAIVGSPSRSSGFILSRTPQLSSDQWSHVRNITEDSGWWPCAFITVPATGGLNTATPLCTL

SEQ ID NO: 33 - DNA, 1758 bp, Corynebacterium glutamicum
  CDS (101)..(1735): RXN01164
gccgatcgtgattgatgaagacgagatccaagcctggacttctgatctcaaacctgaagatttcaccaaaggtaaagatgaatccgacggtgagaaataagtgacactgtttgttcggctcgcccttgctgctgtgggcgggctttttgtctttgcttccaatgaaccgatcggctggtttgtcgcgggaattgttggcactgcattattttttatctcccttgcgccgtgggatctgggagttccccaaaagcggcggaagaagaatgagccagtcccatttttgcaacagatgtccacgggcccaactgttgtacagggcatgcttttaggttttgtccatggcctggtgacatatttgcagctgttgccgtggatcggtgagtttgttggctcactgccttatgtcgcgttgtcagttgtcgaggcgctttattccattgctcttggtgctttcggcgtgctcattgcgcgttggagggactggaaggttctcctgtttccggcgatgtatgtggctgtggagtatctaagaagctcgtggccatttgatggattcgcgtgggttcgcctggcatggggtcaaattaacggtccgttggctaatctcgcagcgcttggtggggtagcgtttgtcactttttccacggtgctggctgccgtgggtgtggccatggtgattatttccaagaagcgactggccggcgcaatcatcaccgcgagtgtgattgctatcggcgcggtgtcatccctgtacgttgaccgcaatggcacgagcgatgaaagcatcgaagtagccgcaattcagggcaatgtgcctcggatgggattggacttcaatgcacagcgccgcgcggtgctggcgaatcacgcacgggaaaccctcaagctggatgaacaagtggatttggtgatctggccggagaattcctcagacgtcaacccattttccgatgcacaagcaagagccattatcgatggagcagtggaacatgttcaggcacctattttggtgggcacgatcaccgtcgatgaggttggtccacgcaacaccatgcaggtatttgatcctgttgaaggtgccgcggagtaccacaataagaagttcttgcagccgtttggtgaatacatgccgtttcgcgaattcctgagaattttctcgccctacgttgattccgctggaaacttccagcccggtgatggcaccggcgtagtggagatgaatgctgcgaacttaggccgcgctgtgacagtgggcgtgatgacgtgttacgaggtcatcttcgaccgtgctggccgcgacgccatcgccaatggggctgaatttttgaccacgcccaccaacaacgccaccttcggattcacggacatgacgtatcagcaattagcaatgagcaggatgcgtgccatcgaatttgatagggcggtggttgttgcagctacatcgggtgtttcggctatcgtcaaccctgatggaagcatttcccaaaacacccgaatttttgaggccgccaccttgacggaatccattccactcaaggacactgtcaccatcgcagcgcgggttggtttctatgttgaattactgttggttatcattggtgtattagctggactattcgccattcgaatgaatagccgttcaaagtctgcgaaaggttccgctcggcccgcacaagttcgggttaagaaggtgcctgcgaaaaaggcagcaactaatcgtcgaaaagtaaaataaaaacgtcccgaagggacgag

SEQ ID NO: 34 - protein, 545 aa, Corynebacterium glutamicum
VTLFVRLALAAVGGLFVFASNEPIGWFVAGIVGTALFFISLAPWDLGVPQKRRKKNEPVPFLQQMSTGPTVVQGMLLGFVHGLVTYLQLLPWIGEFVGSLPYVALSVVEALYSIALGAFGVLIARWRDWKVLLFPAMYVAVEYLRSSWPFDGFAWVRLAWGQINGPLANLAALGGVAFVTFSTVLAAVGVAMVIISKKRLAGAIITASVIAIGAVSSLYVDRNGTSDESIEVAAIQGNVPRMGLDFNAQRRAVLANHARETLKLDEQVDLVIWPENSSDVNPFSDAQARAIIDGAVEHVQAPILVGTITVDEVGPRNTMQVFDPVEGAAEYHNKKFLQPFGEYMPFREFLRIFSPYVDSAGNFQPGDGTGVVEMNAANLGRAVTVGVMTCYEVIFDRAGRDAIANGAEFLTTPTNNATFGFTDMTYQQLAMSRMRAIEFDRAVVVAATSGVSAIVNPDGSISQNTRIFEAATLTESIPLKDTVTIAARVGFYVELLLVIIGVLAGLFAIRMNSRSKSAKGSARPAQVRVKKVPAKKAATNRRKVK

SEQ ID NO: 35 - DNA, 1675 bp, Corynebacterium glutamicum
  CDS (101)..(1675): FRXA01164
gccgatcgtgattgatgaagacgagatccaagcctggacttctgatctcaaacctgaagatttcaccaaaggtaaagatgaatccgacggtgagaaataagtgacactgtttgttcggctcgcccttgctgctgtgggcgggctttttgtctttgcttccaatgaaccgatcggctggtttgtcgcgggaattgttggcactgcattattttttatctcccttgcgccgtgggatctgggagttccccaaaagcggcggaagaagaatgagccagtcccatttttgcaacagatgtccacgggcccaactgttgtacagggcatgcttttaggttttgtccatggcctggtgacatatttgcagctgttgccgtggatcggtgagtttgttggctcactgccttatgtcgcgttgtcagttgtcgaggcgctttattccattgctcttggtgctttcggcgtgctcattgcgcgttggagggactggaaggttctcctgtttccggcgatgtatgtggctgtggagtatctaagaagctcgtggccatttgatggattcgcgtgggttcgcctggcatggggtcaaattaacggtccgttggctaatctcgcagcgcttggtggggtagcgtttgtcactttttccacggtgctggctgccgtgggtgtggccatggtgattatttccaagaagcgactggccggcgcaatcatcaccgcgagtgtgattgctatcggcgcggtgtcatccctgtacgttgaccgcaatggcacgagcgatgaaagcatcgaagtagccgcaattcagggcaatgtgcctcggatgggattggacttcaatgcacagcgccgcgcggtgctggcgaatcacgcacgggaaaccctcaagctggatgaacaagtggatttggtgatctggccggagaattcctcagacgtcaacccattttccgatgcacaagcaagagccattatcgatggagcagtggaacatgttcaggcacctattttggtgggcacgatcaccgtcgatgaggttggtccacgcaacaccatgcaggtatttgatcctgttgaaggtgccgcggagtaccacaataagaagttcttgcagccgtttggtgaatacatgccgtttcgcgaattcctgagaattttctcgccctacgttgattccgctggaaacttccagcccggtgatggcaccggcgtagtggagatgaatgctgcgaacttaggccgcgctgtgacagtgggcgtgatgacgtgttacgaggtcatcttcgaccgtgctggccgcgacgccatcgccaatggggctgaatttttgaccacgcccaccaacaacgccaccttcggattcacggacatgacgtatcagcaattagcaatgagcaggatgcgtgccatcgaatttgatagggcggtggttgttgcagctacatcgggtgtttcggctatcgtcaaccctgatggaagcatttcccaaaacacccgaatttttgaggccgccaccttgacggaatccattccactcaaggacactgtcaccatcgcagcgcgggttggtttctatgttgaattactgttggttatcattggtgtattagctggactattcgccattcgaatgaatagccgttcaaagtctgcgaaaggttccgctcggcccgca

SEQ ID NO: 36 - protein, 525 aa, Corynebacterium glutamicum
VTLFVRLALAAVGGLFVFASNEPIGWFVAGIVGTALFFISLAPWDLGVPQKRRKKNEPVPFLQQMSTGPTVVQGMLLGFVHGLVTYLQLLPWIGEFVGSLPYVALSVVEALYSIALGAFGVLIARWRDWKVLLFPAMYVAVEYLRSSWPFDGFAWVRLAWGQINGPLANLAALGGVAFVTFSTVLAAVGVAMVIISKKRLAGAIITASVIAIGAVSSLYVDRNGTSDESIEVAAIQGNVPRMGLDFNAQRRAVLANHARETLKLDEQVDLVIWPENSSDVNPFSDAQARAIIDGAVEHVQAPILVGTITVDEVGPRNTMQVFDPVEGAAEYHNKKFLQPFGEYMPFREFLRIFSPYVDSAGNFQPGDGTGVVEMNAANLGRAVTVGVMTCYEVIFDRAGRDAIANGAEFLTTPTNNATFGFTDMTYQQLAMSRMRAIEFDRAVVVAATSGVSAIVNPDGSISQNTRIFEAATLTESIPLKDTVTIAARVGFYVELLLVIIGVLAGLFAIRMNSRSKSAKGSARPA

SEQ ID NO: 37 - DNA, 933 bp, Corynebacterium glutamicum
  CDS (101)..(910): RXN01168
ccgcacaagttcgggttaagaaggtgcctgcgaaaaaggcagcaactaatcgtcgaaaagtaaaataaaaacgtcccgaagggacgaggaggacaacaccatgagcagtgaggcagtagatgctacgacgctggtgattattccaacgtacaacgagctggaaaaccttccactcatcgtggatcgcgtgcgcaccgcaacccctgacgttcacgtactcatcgtggacgacaacagcccagacggcaccggcgagcgcgcagacaagcttgctgctgacgacgaccacatttttgtcctccaccgcgaaggcaaaggcggcctgtgcgcagagtacatggctggcttccagtggggcctggagcgcgactaccaggtcctgtgcgaaatggacgccgacggctcccacgcaccagaacagctgcacctgctgctcgctgagatcaccaatggcgctgacctggtcatcggctcgcgctacgtgccaggcggccgcgtagtcaactggcccaagaaccgttggctcttgtccaagggcggcaacgtctacatcagcgtcgcgctcggcgccggcttgaccgatatgaccgcagggtaccgcgcttttcgacgtgaagtgctagaagcactgccgcttgatgagctctccaacgctgggtacattttccaagttgagattgcctaccgtgcagttgaagccggattcgatgttcgtgaagttcccatcactttcaccgagcgtgagatcggcgaatccaagctggacggcagctttgtcaaggattccctgctcgaggtaaccaagtggggcctcaagcaccgcggtggccaggccaaggaactgtccaaggaaatggtcggcctgctgaactatgagtggaagcacttcaaaaagcgcaacacctggctctaaactgcttgccggttagtgaa

SEQ ID NO: 38 - protein, 270 aa, Corynebacterium glutamicum
MSSEAVDATTLVIIPTYNELENLPLIVDRVRTATPDVHVLIVDDNSPDGTGERADKLAADDDHIFVLHREGKGGLCAEYMAGFQWGLERDYQVLCEMDADGSHAPEQLHLLLAEITNGADLVIGSRYVPGGRVVNWPKNRWLLSKGGNVYISVALGAGLTDMTAGYRAFRREVLEALPLDELSNAGYIFQVEIAYRAVEAGFDVREVPITFTEREIGESKLDGSFVKDSLLEVTKWGLKHRGGQAKELSKEMVGLLNYEWKHFKKRNTWL

SEQ ID NO: 39 - DNA, 743 bp, Corynebacterium glutamicum
  CDS (1)..(720): FRXA01168
cgcaccgcaacccctgacgttcacgtactcatcgtggacgacaacagcccagacggcaccggcgagcgcgcagacaagcttgctgctgacgacgaccacatttttgtcctccaccgcgaaggcaaaggcggcctgtgcgcagagtacatggctggcttccagtggggcctggagcgcgactaccaggtcctgtgcgaaatggacgccgacggctcccacgcaccagaacagctgcacctgctgctcgctgagatcaccaatggcgctgacctggtcatcggctcgcgctacgtgccaggcggccgcgtagtcaactggcccaagaaccgttggctcttgtccaagggcggcaacgtctacatcagcgtcgcgctcggcgccggcttgaccgatatgaccgcagggtaccgcgcttttcgacgtgaagtgctagaagcactgccgcttgatgagctctccaacgctgggtacattttccaagttgagattgcctaccgtgcagttgaagccggattcgatgttcgtgaagttcccatcactttcaccgagcgtgagatcggcgaatccaagctggacggcagctttgtcaaggattccctgctcgaggtaaccaagtggggcctcaagcaccgcggtggccaggccaaggaactgtccaaggaaatggtcggcctgctgaactatgagtggaagcacttcaaaaagcgcaacacctggctctaaactgcttgccggttagtgaa

SEQ ID NO: 40 - protein, 240 aa, Corynebacterium glutamicum
RTATPDVHVLIVDDNSPDGTGERADKLAADDDHIFVLHREGKGGLCAEYMAGFQWGLERDYQVLCEMDADGSHAPEQLHLLLAEITNGADLVIGSRYVPGGRVVNWPKNRWLLSKGGNVYISVALGAGLTDMTAGYRAFRREVLEALPLDELSNAGYIFQVEIAYRAVEAGFDVREVPITFTEREIGESKLDGSFVKDSLLEVTKWGLKHRGGQAKELSKEMVGLLNYEWKHFKKRNTWL

SEQ ID NO: 41 - DNA, 1293 bp, Corynebacterium glutamicum
  CDS (101)..(1270): RXN02062
ttgtctaaacatcgttttggggtccgaatgatagccccttttaatgcccccatttcggtatcgctgcgcaactgtttttagatggctaatctttgaaattatgagagtcggaatgatgacaagagagtatccaccagaggtttacggcggcgctggcgtgcacgtcaccgaattgacccgattcatgcgtgagatcgctgaagttgatgttcactgcatgggtgcacctcgcgatatggagggagttttcgtccacggcgtcgatcctgccttggaaagcgcgaaccctgcgattaagacactgtccaccggtttacgcatggcagaagctgcaaacaacgtggatgtcgtgcactcacacacttggtatgcaggtcttggcggccaccttgcagctcgtctccacggcattcctcacgtggctaccgcgcactctttggagccagatcgcccatggaagcgtgagcagcttggcggtggatacgacgtgtcctcctggtctgaaaaaaatgccatggaatacgctgacgcggtcatcgctgtgtcggctcgcatgaaagattccatcctcgctgcgtaccctcgcatcgagccggacaacgtgcgtgttgtcctcaacggcatcgacactgagttgtggcagcctcgcccgactttcgatgacgcggaagattccgtactccgctccctaggcgttgacccacagcggcccatcgtcgcatttgtcggccgcatcacccgccaaaaaggcgtcgagcacctcatcaaggcagcagcgcttttcgacgagtccgtgcagcttgtgctctgtgccggcgcgccagacacccccgaaatcgcagctcgcaccaccgccctggtggaagaactccaggcaaagcgcgaaggcattttctgggttcaggacatgctgggcaaggacaaaatccaagagattctcaccgctgctgacaccttcgtgtgcccatccatttacgagccactgggcatcgtgaacttggaagcaatggcctgcaacaccgcagttgtcgcatccgacgttggaggcatccctgaggttgttgtcgacggcaccaccggcgccctcgttcactacgacgaaaatgatgtcgaaaccttcgagcgcgatatcgccgaagcggtgaataaaatggtcgctgatcgagagaccgcagccaaatttggtctcgcagggcgcgaacgtgctatcaatgatttctcctgggcaacgattgctcagcagaccattgatgtgtacaaatccttgatgtaaaaccgaaagccggggaacct

SEQ ID NO: 42 - protein, 390 aa, Corynebacterium glutamicum
MRVGMMTREYPPEVYGGAGVHVTELTRFMREIAEVDVHCMGAPRDMEGVFVHGVDPALESANPAIKTLSTGLRMAEAANNVDVVHSHTWYAGLGGHLAARLHGIPHVATAHSLEPDRPWKREQLGGGYDVSSWSEKNAMEYADAVIAVSARMKDSILAAYPRIEPDNVRVVLNGIDTELWQPRPTFDDAEDSVLRSLGVDPQRPIVAFVGRITRQKGVEHLIKAAALFDESVQLVLCAGAPDTPEIAARTTALVEELQAKREGIFWVQDMLGKDKIQEILTAADTFVCPSIYEPLGIVNLEAMACNTAVVASDVGGIPEVVVDGTTGALVHYDENDVETFERDIAEAVNKMVADRETAAKFGLAGRERAINDFSWATIAQQTIDVYKSLM

SEQ ID NO: 43 - DNA, 1293 bp, Corynebacterium glutamicum; identical to SEQ ID NO: 41
  CDS (101)..(1270): FRXA02062

SEQ ID NO: 44 - protein, 390 aa, Corynebacterium glutamicum; identical to SEQ ID NO: 42

SEQ ID NO: 45 - DNA, 498 bp, Corynebacterium glutamicum
  CDS (101)..(475): RXA02222
catccgctgaacatcgtctgtctacagcgtttggagaacgcgaaaaagatgaggcagtacaagattgcaaaaaccttgaaaaagtgtatggcagcgatggttgggtcgacctcccccaggagacgttcatactctcctagacgatatcggagcagaggaatctgaagcagataaagttccaattgaatggcaaaacgccctgactaaggcagacaggtatgcaaaccggcaacacatgtctcaggcacgactctatcgccaattaaccagtgatgttggagagggcttcactgaagaagctgcccaatacgcaatcgaaaatgtgaacgcagactggaacgctaacgccctagtaaaagcaagaaattaccaggagcgccaagcaatgtcagtagaccgcatttacaggcaacttactagtgaacacggtgaagggtttaccccagagcaggcacaatacgcgatcgacaacctataaggcataaagatcctagtatt

SEQ ID NO: 46 - protein, 125 aa, Corynebacterium glutamicum
LGRPPPGDVHTLLDDIGAEESEADKVPIEWQNALTKADRYANRQHMSQARLYRQLTSDVGEGFTEEAAQYAIENVNADWNANALVKARNYQERQAMSVDRIYRQLTSEHGEGFTPEQAQYAIDNL

SEQ ID NO: 47 - DNA, 1344 bp, Corynebacterium glutamicum
  CDS (101)..(1321): RXA02313
caggatgtaaccgaaaagatctcaacacttaaataaagttctcgataaagccatgttcggttaactgcgatgtaggcatgatgtggagataataaggcccatgcgggtagcaattgttgcagagtcgttccttccaaatgtcaacggagtcaccaactcggtgctccgggtgttggagcatttgaaagccaacggacacgacgcgctcgtcatcgcgccgggtgcccgggattttgaagaagaaatcggccactacctgggctttgaaattgtgcgcgtccccaccgttcgggtcccactgattgattcactgcccatcggtgttcctctgccctcagttacctctgtgctgcgcgagtacaacccagacatcattcacctggcatccccatttgtgctcggtggagcggcagcattcgcagcaaggcagctgcgcatcccagcaattgctatctatcaaactgatgtcgcagggttctcccagcgctaccacctggcaccgttggccactgcaagctgggaatggatcaagacggtccacaacatgtgccagcgcacccttgctccctcatccatgagcattgacgagctgcgtgaccacggaattaatgatattttccactgggctcggggcgtggactccaagcgtttccaccctggaaagcgttccgtagcgctacgtaagtcttgggatccaagtggagcaaagaagatcgttggtttcgttgggcgccttgcatccgaaaagggcgtggagcgccttgctggattatccggacgctcagacatccaattggtcatcgtcggtgatggcccagaggccaagtacctgcaggaaatgatgccggatgcgatcttcacaggagctctcggcggcgaggaactagccaccacctacgcatcactcgatctgtttgtgcacccaggtgagtttgaaaccttctgccaggcgatccaggaagcccaagcatcaggtgtgcccaccattggcccacgcgcaggtggtcccattgatttgatcaacgaaggcgtcaacggcctgcttcttgatgttgtagatttcaaggaaaccctccccgctgcagccgaatggattttggacgattcccgccactccgaaatgtgcgcagctgcttgggaaggtgtgaaagacaagacctgggaagctttgtgcacccagcttctccagcactacgcggatgtaatcgcattgtcacagcgcatcccactgacattctttggccctagcgctgaagtagcaaagcttccactgtgggttgctcgcgcgctgggtgttcgcacccgcatcagcatcgaggcttaactctgcagaattaatccatg

SEQ ID NO: 48 - protein, 407 aa, Corynebacterium glutamicum
MRVAIVAESFLPNVNGVTNSVLRVLEHLKANGHDALVIAPGARDFEEEIGHYLGFEIVRVPTVRVPLIDSLPIGVPLPSVTSVLREYNPDIIHLASPFVLGGAAAFAARQLRIPAIAIYQTDVAGFSQRYHLAPLATASWEWIKTVHNMCQRTLAPSSMSIDELRDHGINDIFHWARGVDSKRFHPGKRSVALRKSWDPSGAKKIVGFVGRLASEKGVERLAGLSGRSDIQLVIVGDGPEAKYLQEMMPDAIFTGALGGEELATTYASLDLFVHPGEFETFCQAIQEAQASGVPTIGPRAGGPIDLINEGVNGLLLDVVDFKETLPAAAEWILDDSRHSEMCAAAWEGVKDKTWEALCTQLLQHYADVIALSQRIPLTFFGPSAEVAKLPLWVARALGVRTRISIEA

SEQ ID NO: 49 - DNA, 1377 bp, Corynebacterium glutamicum
  CDS (101)..(1354): RXA02491
tttcgtatgctgacatggtgtcccttcaactgcgttgctttagtgccctttagtatatagagacgtcccgctgctttcttcggcgatctagaatgtgggcatgcgcgtagctatgatttccatgcacacctctccattgcagcagcccggaactggtgattcaggcggcatgaacgtctacattctttcgaccgcgactgagctagcgaaacagggtatcgaggtcgatatttacactcgtgccacgaggccttctcagggtgagatcgtgagagtagctgagaatttgcgggtcattaatatcgctgcggggccgtatgaggggctttccaaagaggagcttcctactcagttggcggcgtttaccggcggaatgttgtcgtttacgcgccgggagaaggttacttatgatctgatccattctcactattggctgtctggtcaggtggggtggttgctgcgcgatttgtggcggattccccttattcatacggcacacactttggcggcggtgaagaattcttatcgggatgattcggacactccggagtcggaggcgcgtcgcatttgtgagcagcagctggtggataacgctgacgtgttggcggtgaacactcaggaggagatgcaggatttgatgcatcactacgatgcggatccggatcggatttctgtggtgtcaccgggtgcggacgtggaactttatagccctggaaatgatcgcgcgacggaacgttcccgtcgtgagctgggcattccgctgcacacaaaggtagtggcttttgtgggtcggttgcagccgtttaagggcccgcaggtgctgatcaaggcggttgcggcgttgtttgatcgcgatccggaccgaaatctgcgcgtcattatttgtggcggcccttctggtccgaatgcgacaccggatacctataggcatatggcagaggaactgggcgtcgaaaagcgaattcgctttttggacccgcgcccgccgagcgagctagtggccgtgtatcgggcggcggacatcgtggccgtgccaagttttaatgagtccttcggactcgtcgccatggaggcgcaagccagcggcacaccggtcattgcggcccgggttggcggcctgcccatcgcagtcgcggaaggggagacgggattgcttgtcgacggccactccccgcatgcctgggccgacgccttagccacactcttggacgatgacgaaacgcgcatcagaatgggtgaagacgccgtcgaacacgccagaacattctcctgggcggccaccgccgcacagctatcgtcgctgtacaacgacgctattgccaacgaaaatgtcgacggtgaaacgcatcacggctaagtaaacgcgcgtcgtggaac

SEQ ID NO: 50 - protein, 418 aa, Corynebacterium glutamicum
MRVAMISMHTSPLQQPGTGDSGGMNVYILSTATELAKQGIEVDIYTRATRPSQGEIVRVAENLRVINIAAGPYEGLSKEELPTQLAAFTGGMLSFTRREKVTYDLIHSHYWLSGQVGWLLRDLWRIPLIHTAHTLAAVKNSYRDDSDTPESEARRICEQQLVDNADVLAVNTQEEMQDLMHHYDADPDRISVVSPGADVELYSPGNDRATERSRRELGIPLHTKVVAFVGRLQPFKGPQVLIKAVAALFDRDPDRNLRVIICGGPSGPNATPDTYRHMAEELGVEKRIRFLDPRPPSELVAVYRAADIVAVPSFNESFGLVAMEAQASGTPVIAARVGGLPIAVAEGETGLLVDGHSPHAWADALATLLDDDETRIRMGEDAVEHARTFSWAATAAQLSSLYNDAIANENVDGETHHG

SEQ ID NO: 51 - DNA, 1287 bp, Corynebacterium glutamicum
  CDS (101)..(1264): RXN02595
gtgggtaaaggggactccgaggaagtccacgtcgtcttctttcgcggcgctgaggatggtttcgcggatttgtgcgggggagtgggtgggagagaaaacggtgatcgttgtggccatggcttccattatggcttgtttaaaagcagctagactgaataaccctatgaagatccttttgttgtgctggcgtgataccactcatcctcaaggtggcggaagtgaacgctatctggagcgggtgggtgagtttttggcggatcagggccatgaggtggtgtttcgtactgctgggcacacggatgcgccacggcgttctttccgcgatggtgtgaggtattccaggagcggtgggaagtttagtgtgtatcccaaggcgtgggtggccatgatgttgggtcgtgtggggattggcacgttttccaaggttgatgtggtggtggatacgcagaatggcattccgttttttggaaagtttttctccggtaagccgactgtgttgctcacgcatcattgccataaggagcagtggccggtggtgggtcgggtgctggcgaaggttggttggctgattgagagccagatcgcgccgcgcgcttacaaaactgcgccgtatgtgactgtttcagagccgagcgctgaggagctcattgcgttgggtgtggatcagcagcggattcatatcgtgcgcaatggcgtggatcccgtgccgctgcacacgccgaagctggatcgcgatggccagcatgcggtgacgttgtcgcgcctggttccgcacaagcagattgagcatgcgatggatgtcgtcgcggcgctcgacggcgtggtgctggatgtagtcgaaagcggttggtggcagaaggaactggtcgattatgcccgcacgctgggtgtgagcgatcgcgtggttttccacggccaggtcgccgaggatcacaagcacgccctgttggagcgcgccacgattcatctcatgccttcgcgcaaggaaggctggggcctggcggtcacggaggcggcgcagcacggcgttccgacgatcggttaccgaagctcaggcggcctgcgcgattccgtcgtcgacggcgaaaccggcctgcttgtcgactccaaggccgagcttatttcagccaccaaaaccctgcttatcgacgcctccctccgctccaagctcggcgccagcgcgaagcagcgcgccgaaaactacaagtgggacaccgcgggagcgcagttcgaggaactacttcttggtcttgcgtcgaaaaagtagtcccagcggcaacgccatcc

SEQ ID NO: 52 - protein, 388 aa, Corynebacterium glutamicum
VIVVAMASIMACLKAARLNNPMKILLLCWRDTTHPQGGGSERYLERVGEFLADQGHEVVFRTAGHTDAPRRSFRDGVRYSRSGGKFSVYPKAWVAMMLGRVGIGTFSKVDVVVDTQNGIPFFGKFFSGKPTVLLTHHCHKEQWPVVGRVLAKVGWLIESQIAPRAYKTAPYVTVSEPSAEELIALGVDQQRIHIVRNGVDPVPLHTPKLDRDGQHAVTLSRLVPHKQIEHAMDVVAALDGVVLDVVESGWWQKELVDYARTLGVSDRVVFHGQVAEDHKHALLERATIHLMPSRKEGWGLAVTEAAQHGVPTIGYRSSGGLRDSVVDGETGLLVDSKAELISATKTLLIDASLRSKLGASAKQRAENYKWDTAGAQFEELLLGLASKK

SEQ ID NO: 53 - DNA, 751 bp, Corynebacterium glutamicum
  CDS (101)..(751): FRXA02595
gtgggtaaaggggactccgaggaagtccacgtcgtcttctttcgcggcgctgaggatggtttcgcggatttgtgcgggggagtgggtgggagagaaaacggtgatcgttgtggccatggcttccattatggcttgtttaaaagcagctagactgaataaccctatgaagatccttttgttgtgctggcgtgataccactcatcctcaaggtggcggaagtgaacgctatctggagcgggtgggtgagtttttggcggatcagggccatgaggtggtgtttcgtactgctgggcacacggatgcgccacggcgttctttccgcgatggtgtgaggtattccaggagcggtgggaagtttagtgtgtatcccaaggcgtgggtggccatgatgttgggtcgtgtggggattggcacgttttccaaggttgatgtggtggtggatacgcagaatggcattccgttttttggaaagtttttctccggtaagccgactgtgttgctcacgcatcattgccataaggagcagtggccggtggtgggtcgggtgctggcgaaggttggttggctgattgagagccagatcgcgccgcgcgcttacaaaactgcgccgtatgtgactgtttcagagccgagcgctgaggagctcattgcgttgggtgtggatcagcagcggattcatatcgtgcgcaatggcgtggatcccgtgccgctgcacacgccgaagctggatcgcgatggccagcatgcggtg

SEQ ID NO: 54 - protein, 217 aa, Corynebacterium glutamicum
VIVVAMASIMACLKAARLNNPMKILLLCWRDTTHPQGGGSERYLERVGEFLADQGHEVVFRTAGHTDAPRRSFRDGVRYSRSGGKFSVYPKAWVAMMLGRVGIGTFSKVDVVVDTQNGIPFFGKFFSGKPTVLLTHHCHKEQWPVVGRVLAKVGWLIESQIAPRAYKTAPYVTVSEPSAEELIALGVDQQRIHIVRNGVDPVPLHTPKLDRDGQHAV

SEQ ID NO: 55 - DNA, 834 bp, Corynebacterium glutamicum
  CDS (101)..(811): RXA02616
agtgttacttccggtagataacaagatggtctcaattaaacttcgatagcgtgatataagcttcgaaaagttttgtggcaagaatcggaagcaggcgaaattgcagaagcacactcgaggtggcaagcaccgcaagcagactacctccccagtaactaagggtggtgtcgcttttgttgcagtagctaccggtgccgtgtcaactgcaggcgcaggcggagcagttgctgcacaggcttccaatcagcccgttgaggtcaacttcgagcttactgcaaacgacacaactgacctcgtggctggaagctccgcccctcagatcctgtccatcgctgagttcaagccagttgtgaacttgggcgatcagatcgttaagaccattcagtacaacgctgaccgcattcaggctgacctggacgctcgtggcccttcagtggttcgccctgctgaaggttcttacacctccggcttcggtgctcgttggggcaccaaccacaacggtgtggatatcgctaacgcaatcggcactccaatcctcgctgccatggacggcactgttatcgatgcaggtcctgcttccggtttcggtaactgggttcgcctccagcacgaagatggcaccatcaccgtgtacggccacatggaaaccgttgaggtgaccgttggtcagactgttaaggctggcgagcgcatcgcaggcatgggtagccgaggattctccaccggctcccacctccacttcgaggtttaccctgcaggcggtggcgctgttgatccagctccttggcttgcagagcgcggcattactctttaattaacttttgggcgaccctt

SEQ ID NO: 56 - protein, 237 aa, Corynebacterium glutamicum
LQKHTRGGKHRKQTTSPVTKGGVAFVAVATGAVSTAGAGGAVAAQASNQPVEVNFELTANDTTDLVAGSSAPQILSIAEFKPVVNLGDQIVKTIQYNADRIQADLDARGPSVVRPAEGSYTSGFGARWGTNHNGVDIANAIGTPILAAMDGTVIDAGPASGFGNWVRLQHEDGTITVYGHMETVEVTVGQTVKAGERIAGMGSRGFSTGSHLHFEVYPAGGGAVDPAPWLAERGITL

SEQ ID NO: 57 - DNA, 866 bp, Corynebacterium glutamicum
  CDS (1)..(843): RXA02627
gatgtcactgtggaaagccaaccagaacgcgtcgttgccctgggttggggagatgctgaggctgcgctggaattcggtgtgcagcctgtgggtgcatcagattggctcgcattcggtggtgaaggcgtgggaccgtggattgaggattctgcctacgatgaagcgccagaaataatcggaaccatggaaccggagtatgaaaagattgcagcgcttgaaccggatctgattttggacgtgcgcagctctggcgaccaggaacgctatgacaagttgtcttcaatcgcactgaccatcggcgttccagaaggtggcgatagctacctcaccccacgcgctgagcaggtaaccatgatcgccactgctctggggcaggctgaacgtggtgaagaagtgaacgctgaatacgagcagctcactgctgatattcgtgcagctcacccgggctggcctgagaagaccgcggctgctgtatctgcaacggcaaccagctggggtgcatacatcaagggctccaaccgtgtagatactttgctggacctgggcttccaggaaaaccctgagctggctaaacagcaacctggcgatacgggtttctccatcaaattcagtgaagagactttcggcgttgtggattccgacctggttgtcggctttgccatcggtatgactcctgaggaaatggcagagcaggttccatggcagatgttgaccgccactcgtgacggccgttcctttgtgatgccccgtgagatttccaatgcgttttctttgggttccccgcagtccactcggttcgcgttagacgccttggtgccacttctggaggagcatgcaggggagtagtggtccggtggtgcgggcag

SEQ ID NO: 58 - protein, 281 aa, Corynebacterium glutamicum
DVTVESQPERVVALGWGDAEAALEFGVQPVGASDWLAFGGEGVGPWIEDSAYDEAPEIIGTMEPEYEKIAALEPDLILDVRSSGDQERYDKLSSIALTIGVPEGGDSYLTPRAEQVTMIATALGQAERGEEVNAEYEQLTADIRAAHPGWPEKTAAAVSATATSWGAYIKGSNRVDTLLDLGFQENPELAKQQPGDTGFSIKFSEETFGVVDSDLVVGFAIGMTPEEMAEQVPWQMLTATRDGRSFVMPREISNAFSLGSPQSTRFALDALVPLLEEHAGE

SEQ ID NO: 59 - DNA, 702 bp, Corynebacterium glutamicum
  CDS (101)..(679): RXA02650
gaatttttgctgcaactgtgtaaaaaccagcgctgaattaaagatcacctttcacccttaattgagcctgggtggaagtttctaccgctcatggggaaagatggtcaacgtgacctcaaaggatgcaggggcaaacgtgacccccatgagtaagaaagaaaagaggacaaccgttaaacaggtggttgccttgatggccgccatcgttgtggtgattgcgtccctagaccaaatagtcaagcagattatgcttagttggttggaacctggcgttcccgttcccatcattggggattggttccgcttctacctcctgtttaaccccggagccgcattttcgatgggtggggaaaacagcacctggatctttacaaccatccagttgagcttcgtcatcggtatcgcaatttatgccccacgcatcaaacacaagtggatcgcggcaggacttgcccttgttgccggtggagccttgggaaacgtgttggaccggttgttcagagatccttccttcttcttcggacatgttgttgattacatctccgtaggaaactttgcagtatttaatatcgccgatgcctcgatttcttgcggcgtcgtggtgttcctgatcggaatgttccttgaggaccgtgaaaacgcccagcatgccaaagcaactgacgagaaggatgaggcctgatgaacaaccgacaaagcaga

SEQ ID NO: 60 - protein, 193 aa, Corynebacterium glutamicum
MVNVTSKDAGANVTPMSKKEKRTTVKQVVALMAAIVVVIASLDQIVKQIMLSWLEPGVPVPIIGDWFRFYLLFNPGAAFSMGGENSTWIFTTIQLSFVIGIAIYAPRIKHKWIAAGLALVAGGALGNVLDRLFRDPSFFFGHVVDYISVGNFAVFNIADASISCGVVVFLIGMFLEDRENAQHAKATDEKDEA

SEQ ID NO: 61 - DNA, 1071 bp, Corynebacterium glutamicum
  CDS (101)..(1048): RXA01094
gtcagctgaccggggtagcgggcggtgggcggacaagtcttgctagattgaagtgcattacttgtcgcctgactgttaggtttacgttgttgtggatgtcatgactttggccacgattccctcaccaccgcagggtgtgtggtacttgggtcccattccgattagggcctatgcgatgtgcatcatcgctggcattattgttgccatttggctgacgagaaagcgctacgccgcccgcggtggaaaccctgaaatcgtccttgatgcagcgatcgtggcagttcctgccggaatcatcggtggacgcatttatcacgtcattaccgacaaccaaaagtacttctgcgatacctgtaaccccgtcgacgccttcaaaatcaccaacggtggtctgggcatctggggtgcagtgatcctcggtggcctggcagtggccgtattcttccggtacaaaaagcttcctcttgcacctttcgcagatgccgtggcacctgcagttatcctggcgcagggaattggtcgtctgggcaactggtttaaccaggagctctacggtgcagaaactaccgttccatgggctttggaaatctactatcgggtagatgaaaatggaaaattcgcaccggtgacaggaacatccaccggtgaagtaatggctactgttcatccaacattcctctatgaactgttgtggaacctactgatcttcgctttgttgatgtgggctgacaagcgattcaagctggaacatggccgagtatttgctctctacgtagctggttacaccttgggccgtttctggattgaacaaatgcgcgttgatgaagccacgcttattggcggcatccgaatcaacaccatcgtctccgcagtagtgtttgccggcgcgatcatcgtgttcttcctgttgaagaagggtagggaaactcccgaagaggtagatccgactttcgcagcgtctgttgcagcagatgctgtagcttcgccagatagaaaacccttgccgaaagcaggggagggcattgatggagaaacgccctcaacgcgataggtttcaaccataggcctgac

SEQ ID NO: 62 - protein, 316 aa, Corynebacterium glutamicum
MTLATIPSPPQGVWYLGPIPIRAYAMCIIAGIIVAIWLTRKRYAARGGNPEIVLDAAIVAVPAGIIGGRIYHVITDNQKYFCDTCNPVDAFKITNGGLGIWGAVILGGLAVAVFFRYKKLPLAPFADAVAPAVILAQGIGRLGNWFNQELYGAETTVPWALEIYYRVDENGKFAPVTGTSTGEVMATVHPTFLYELLWNLLIFALLMWADKRFKLEHGRVFALYVAGYTLGRFWIEQMRVDEATLIGGIRINTIVSAVVFAGAIIVFFLLKKGRETPEEVDPTFAASVAADAVASPDRKPLPKAGEGIDGETPSTR

SEQ ID NO: 63 - DNA, 1206 bp, Corynebacterium glutamicum
  CDS (101)..(1183): RXN00934
ccaacccctgtggtttggtgatttggatccggagcgtctcaagcgctctagggagcagacaaatgttcacaaaccggtggcattacaggaggacaattaggtgcgaattggaatggtctgcccgtactccttcgatgagccgggcggtgttcaagcgcatatccttgacttagcgcgaaccttcattgcccaaggccatgaggttcaggtgcttggtccgtgtagtgcggatacgcaggtgcccgatttcgtggtgcgcggtggtggcagcatcccgattccgtacaatggctcggttgcccgcttgagctttgggccgaaaatgttcaaggccgtgcgcacgttcctccgcgaaggcaacttcgatgtgctgcatatccatgaaccgaattcaccaagtttttccatggcggcgctacgctttgcggaaggccccatcgttgctacttaccacgcctccagtagcggatcgaagctgctcaaggctttcttaccagtgctttcgcccatgctggagaaagtgcgcgcaggcatcgccgtgtctgaaatggctcggcgctggcaggtggagcaagtcggcggcgatcccgtgctgatccccaacggggtagagacctccatgttcaaagccgcgcgccaaatcgaaccgaatgatcctgtagagatcgtctttttgggtcgcctcgatgagtcccgcaaaggcctcgacatcctcctgcgcgctctgaccaggctggatcgcccgtttacctgcaccgtcattggcggcggcaccccgcgagaagtcgccggcatcaactttgtgggccgcgtcagcgatgaggaaaaggcagcaatcttaggtcgcgcagacatctatgtcgcacccaacaccggcggcgaaagcttcggcatcgtgctagttgaagcgatggccgcgggatgcgctgtcgtcgccagcgacctagaagcgttctccctggtcaccgattctgaagccgcacagccagcgggcgtgctatttaaaaccggctcagacgccgacctagccaaaaaacttcaagcgcttatcgacgacccctcctcccgttccacgcttatcgccgcggggctaaagcgcgcaaacgcctacgactggtcgacagtatccacccaggtcatggcagtctatgaaaccattgcgatcgacaaagtgaggcttggatgacccttgtttacctcctcatc

SEQ ID NO: 64 - protein, 361 aa, Corynebacterium glutamicum
VRIGMVCPYSFDEPGGVQAHILDLARTFIAQGHEVQVLGPCSADTQVPDFVVRGGGSIPIPYNGSVARLSFGPKMFKAVRTFLREGNFDVLHIHEPNSPSFSMAALRFAEGPIVATYHASSSGSKLLKAFLPVLSPMLEKVRAGIAVSEMARRWQVEQVGGDPVLIPNGVETSMFKAARQIEPNDPVEIVFLGRLDESRKGLDILLRALTRLDRPFTCTVIGGGTPREVAGINFVGRVSDEEKAAILGRADIYVAPNTGGESFGIVLVEAMAAGCAVVASDLEAFSLVTDSEAAQPAGVLFKTGSDADLAKKLQALIDDPSSRSTLIAAGLKRANAYDWSTVSTQVMAVYETIAIDKVRLG

SEQ ID NO: 65 - DNA, 812 bp, Corynebacterium glutamicum
  CDS (1)..(789): FRXA00934
ccaagtttttccatggcggcgctaccctttgcggaaggccccatcgttgctacttaccacgcctccagtagcggatcgaagctgctcaaggctttcttaccagtgctttcgcccatgctggagaaagtgcgcgcaggcatcgccgtgtctgaaatggctcggcgctggcaggtggagcaagtcggcggcgatcccgtgctgatccccaacggggtagagacctccatgttcaaagccgcgcgccaaatcgaaccgaatgatcctgtagagatcgtctttttgggtcgcctcgatgagtcccgcaaaggcctcgacatcctcctgcgcgctctgaccaggctggatcgcccgtttacctgcaccgtcattggcggcggcaccccgcgagaagtcgccggcatcaactttgtgggccgcgtcagcgatgaggaaaaggcagcaatcttaggtcgcgcagacatctatgtcgcacccaacaccggcggcgaaagcttcggcatcgtgctagttgaagcgatggccgcgggatgcgctgtcgtcgccagcgacctagaagcgttctccctggtcaccgattctgaagccgcacagccagcgggcgtgctatttaaaaccggctcagacgccgacctagccaaaaaacttcaagcgcttatcgacgacccctcctcccgttccacgcttatcgccgcggggctaaagcgcgcaaacgcctacgactggtcgacagtatccacccaggtcatggcagtctatgaaaccattgcgatcgacaaagtgaggcttggatgacccttgtttacctcctcatc

SEQ ID NO: 66 - protein, 263 aa, Corynebacterium glutamicum
PSFSMAALPFAEGPIVATYHASSSGSKLLKAFLPVLSPMLEKVRAGIAVSEMARRWQVEQVGGDPVLIPNGVETSMFKAARQIEPNDPVEIVFLGRLDESRKGLDILLRALTRLDRPFTCTVIGGGTPREVAGINFVGRVSDEEKAAILGRADIYVAPNTGGESFGIVLVEAMAAGCAVVASDLEAFSLVTDSEAAQPAGVLFKTGSDADLAKKLQALIDDPSSRSTLIAAGLKRANAYDWSTVSTQVMAVYETIAIDKVRLG

SEQ ID NO: 67 - DNA, 618 bp, Corynebacterium glutamicum
  CDS (101)..(595): RXA02605
tccgatcctgtcatctacatgtgggagactttccttacccaggaattgcctgcataccttgagcagaacttcggcgttgcgcgaaacaacaactccattggtggcctgtccatgggcgggaactgccgcgctgaacctcgcagcaaagcacccagatcagttccgccaggctatgtcttggtccggctacttgaacaccactgcgccaggcatgcaaaccctgctgcgtgtggccatgctggacaccggtggattcaacgtcaacgcaatgtatggctcaatcattaacccacgtcgttttgaaaacgacccattctggaacatgggcggcttggctaacaccgacgtctacatctctgcagcttccggcctgtggagccctcaggatgatggagttcgcgtagaccaccgcctcactggttctgtgcttgaattcgtggcaatgacatccaccaggatttgggaagcaaaggcaaggcttcagggtctgaacccaactgcggattacccaatgtatggcattcacggctgggctcagttcaactcccagctggagagaactcagggtcgtgttctagacgtcatgaacgcctggtagagccacaccaaaggccacac

SEQ ID NO: 68 - protein, 165 aa, Corynebacterium glutamicum
VACPWAGTAALNLAAKHPDQFRQAMSWSGYLNTTAPGMQTLLRVAMLDTGGFNVNAMYGSIINPRRFENDPFWNMGGLANTDVYISAASGLWSPQDDGVRVDHRLTGSVLEFVAMTSTRIWEAKARLQGLNPTADYPMYGIHGWAQFNSQLERTQGRVLDVMNAW

SEQ ID NO: 69 - DNA, 1386 bp, Corynebacterium glutamicum
  CDS (101)..(1363): RXN00525
ccatcgtgtttattactcacaaccctgagcttgctgatgaatctgatcgggtggtcaccatggttgacgggcgcatcattgggtctgaggtgaaacactcatgagccttgcagaatcaattcttttggcgctcaccagcctgagaagcaacaagatgcgtgcattgttgacgctgttaggagtcatcattggtatcgcatcagtcatcggaattttgaccattggtaaagccctgcaggatcaaactttgaatagtttggaaagcttgggcgcgaatgatctgtcggcgcaggtggaggaacgccccgacgaagattcccccgaacccgatatgttcgctttttctggggctgcaaactctagtggcaatctgattccggaagaaacagttgatacgctgcgcgatcgtttcgcaggcagcatcacgggaatcagcgttggcggaatgggtacgcaaggcactctcatcggcgacaccgcagatcttaaatccgatctcctcggcgtcaacgaggattatatgtggatgaatggcgtcgaaatgaactacggccgcgccatcacgcaagacgatgttgccgctcagcgccccgttgcggtcatcgccccagacacctttaatacgcttttcgacgcaaaccccaacctcgctctggggtccgaagtagcttttgaactcaacggtcaagagacatttttgcgggttatcggtgtgtataaagaagccgcagcaggtggacttgtgggaagcaatccaaccgtccacacctacaccccatatacggtggccaatgacatcacccacacggaagatggattgaacacgttaagtatccgtgcagctcagggcgtagaccaggattcacttaagggttcactgcaaacctacttcgacgcgctgtacgccaacaatgactcgcaccacgttgccatgttggacttccgtaaacagatcgaagagttcaacaccattctcggcgcaatgagtttgggtatctcagccatcggcggaatttccttgcttgtcggtggcatcggagtgatgaacattatgttggtgtctgtcaccgagcgaacccgcgaaatcggtgtccgaaaagccctcggcgctcgtcgacgtgacattcgcctgcaattcgtcgttgaagccatgatcatttgtttcatcggtggcatcctcggcgtgcttttgggcggcattttgggattgatcatgtccagcgctattggctacatttccttgccaccactgagtggaatcgtgatcgccttggtattttccatggctatcggcctgtttttcggctactaccccgccaacaaggcagcaaagctcgatccaattgacgccttgcgttatgagtaaaagcctcgtttttaaggtag

SEQ ID NO: 70 - protein, 421 aa, Corynebacterium glutamicum
MSLAESILLALTSLRSNKMRALLTLLGVIIGIASVIGILTIGKALQDQTLNSLESLGANDLSAQVEERPDEDSPEPDMFAFSGAANSSGNLIPEETVDTLRDRFAGSITGISVGGMGTQGTLIGDTADLKSDLLGVNEDYMWMNGVEMNYGRAITQDDVAAQRPVAVIAPDTFNTLFDANPNLALGSEVAFELNGQETFLRVIGVYKEAAAGGLVGSNPTVHTYTPYTVANDITHTEDGLNTLSIRAAQGVDQDSLKGSLQTYFDALYANNDSHHVAMLDFRKQIEEFNTILGAMSLGISAIGGISLLVGGIGVMNIMLVSVTERTREIGVRKALGARRRDIRLQFVVEAMIICFIGGILGVLLGGILGLIMSSAIGYISLPPLSGIVIALVFSMAIGLFFGYYPANKAAKLDPIDALRYE

SEQ ID NO: 71 - DNA, 760 bp, Corynebacterium glutamicum
  CDS (101)..(760): FRXA00525
ccatcgtgtttattactcacaaccctgagcttgctgatgaatctgatcgggtggtcaccatggttgacgggcgcatcattgggtctgaggtgaaacactcatgagccttgcagaatcaattcttttggcgctcaccagcctgagaagcaacaagatgcgtgcattgttgacgctgttaggagtcatcattggtatcgcatcagtcatcggaattttgaccattggtaaagccctgcaggatcaaactttgaatagtttggaaagcttgggcgcgaatgatctgtcggcgcaggtggaggaacgccccgacgaagattcccccgaacccgatatgttcgctttttctggggctgcaaactctagtggcaatctgattccggaagaaacagttgatacgctgcgcgatcgtttcgcaggcagcatcacgggaatcagcgttggcggaatgggtacgcaaggcactctcatcggcgacaccgcagatcttaaatccgatctcctcggcgtcaacgaggattatatgtggatgaatggcgtcgaaatgaactacggccgcgccatcacgcaagacgatgttgccgctcagcgccccgttgcggtcatcgccccagacacctttaatacgcttttcgacgcaaaccccaacctcgctctggggtccgaagtagcttttgaactcaacggtcaagagacatttttgcgggttatcggtgtgtataaagaagccgcagcaggtggacttgtgggaagcaatccaacc

SEQ ID NO: 72 - protein, 220 aa, Corynebacterium glutamicum
MSLAESILLALTSLRSNKMRALLTLLGVIIGIASVIGILTIGKALQDQTLNSLESLGANDLSAQVEERPDEDSPEPDMFAFSGAANSSGNLIPEETVDTLRDRFAGSITGISVGGMGTQGTLIGDTADLKSDLLGVNEDYMWMNGVEMNYGRAITQDDVAAQRPVAVIAPDTFNTLFDANPNLALGSEVAFELNGQETFLRVIGVYKEAAAGGLVGSNPT

SEQ ID NO: 73 - DNA, 617 bp, Corynebacterium glutamicum
  CDS (1)..(594): FRXA00556
tacaccccatatacggtggccaatgacatcacccacacgaaagatggattgaacacgttaagtatccgtgcagctcagggcgtagaccaggattcacttaagggttcactgcaaacctacttcgacgcgctgtacgccaacaatgactcgcaccacgttgccatgttggacttccgtaaacagatcgaagagttcaacaccattctcggcgcaatgagtttgggtatctcagccatcggcggaatttccttgcttgtcggtggcatcggagtgatgaacattatgttggtgtctgtcaccgagcgaacccgcgaaatcggtgtccgaaaagccctcggcgctcgtcgacgtgacattcgcctgcaattcgtcgttgaagccatgatcatttgtttcatcggtggcatcctcggcgtgcttttgggcggcattttgggattgatcatgtccagcgctattggctacatttccttgccaccactgagtggaatcgtgatcgccttggtattttccatggctatcggcctgtttttcggctactaccccgccaacaaggcagcaaagctcgatccaattgacgccttgcgttatgagtaaaagcctcgtttttaaggtag

SEQ ID NO: 74 - protein, 198 aa, Corynebacterium glutamicum
YTPYTVANDITHTKDGLNTLSIRAAQGVDQDSLKGSLQTYFDALYANNDSHHVAMLDFRKQIEEFNTILGAMSLGISAIGGISLLVGGIGVMNIMLVSVTERTREIGVRKALGARRRDIRLQFVVEAMIICFIGGILGVLLGGILGLIMSSAIGYISLPPLSGIVIALVFSMAIGLFFGYYPANKAAKLDPIDALRYE

SEQ ID NO: 75 - DNA, 939 bp, Corynebacterium glutamicum
  CDS (101)..(916): RXA02750
gttccatggacgatgtatttctagcagttacagctgaacggaaacgatcatgattacagttctgacacgcagacacttgcgctgctttttccgcgaccgcatggcagtgctgttttccatcatgggtgcgctcatccttttggtcctgtacgtgctgtttttaggaaaactgcaaattgacggtctcatggtggatctacctgactcagcccgagacgatgttgaaggattcgtcttcaattgggtgttttccggaattctcatcacgtccgcaatcactgttccgcaagcagcacttggagtgctggttgaagatcgcacccgcggaggcatcaaagatttcctcgtggcacccgtatccagaacgacgctgacggtgtcctatatcttcgcagcagtcattgtcgccatgacgattttgatctttgaaatcgtggtgggaagtattggtttagctattttggggcacttcagcatgagcattgctcgcgtgctcgaattggtagtcgccttgcttctgctcaccctggtgttttccgcaattgcagcatttctgatcaccttggtgaaatctcaaggcggaatgtctgcgctttcaagcctggtaggcaccctggcgggctttttatctgctgcttatattccacccatcgcattgcctgaagcagtgacaaacgtgttgaacttcctcccgtttaccccagctggaatgttgatcagacaaattgtggttgccccagcattggacgcgatttcacttccacccgaagccttcgatatcttccaattcggatacggactcaaactggaaatgtttggggaacccgtttctacatgggtggcagtaggaattgttgcctcatggggagtggtgtttggactcattgccgcgttcaaaatgaaaagcgtggtgcgataaatcctgctaaagaatgcttc

SEQ ID NO: 76 - protein, 272 aa, Corynebacterium glutamicum
MAVLFSIMGALILLVLYVLFLGKLQIDGLMVDLPDSARDDVEGFVFNWVFSGILITSAITVPQAALGVLVEDRTRGGIKDFLVAPVSRTTLTVSYIFAAVIVAMTILIFEIVVGSIGLAILGHFSMSIARVLELVVALLLLTLVFSAIAAFLITLVKSQGGMSALSSLVGTLAGFLSAAYIPPIALPEAVTNVLNFLPFTPAGMLIRQIVVAPALDAISLPPEAFDIFQFGYGLKLEMFGEPVSTWVAVGIVASWGVVFGLIAAFKMKSVVR

SEQ ID NO: 77 - DNA, 1815 bp, Corynebacterium glutamicum
  CDS (101)..(1792): RXN02096
cgcttcgacgacctcacccacagcgatatccgcaggaatctcatcgcggtttttgatgagccgttcttgtactcctcctccataccgcgagaacatctcgatgggtttggatgtcagtgatgagcagatcgaacacgcagccaggcttgcccaggctcatgattttatcgatcgccttccaaacaaatacgaggaagtcattggcgaacgcggcctgacgctttctggtggtcaacgccaacgcatcgccctcgcacgggctttcctggcgcatcccaaagtgttggtgcttgatgatgccacctctgccattgatgcctccactgaggaccgcattttccaggccttgcgcgaagaactgcacgatgtcaccattttgatcatcgcgcaccgccactccactttggagctcggcgatcgggttggtctggtcgaagatggacgggtaacagcactgggaccgttgagtgagatgcgtgatcacgctcgtttctcgcatctgatggctcttgatttccaggattctcacgatccggaattcaccctcgacaacggttcactacccagccaagagcaattgtggccggaggtctccacagaaaagcagtacaagattcttgcgcctgcccctggtcgaggccgtggcatgtccatgccagcaacccctgagctgctcgcccagattgaggcgctgccagcagcaacggaagaaacacgagttgatgccgggaggctacgcaccagtacctccggtttcaaattgctcagtttattcaagcaggtccgttggctcgtcgtcgcggtcatcgcgttgttgctggtgggcgtagccgccgatctagcatttccaacactgatgcgcgcagccatcgacaacggtgtgcaagcacaaagcacctccacgttgtggtggatcgccatcgcaggcagcgtagtagtccttctgtcctgggccgccgccgcgatcaacacgattatcacggcacgcaccggtgaacggctgctttacggcttgcgtctgcgctcatttgtgcatctattgcgcctgtccatgagctatttcgaacgcaccatgtccggccgcatcatgacgcgcatgaccaccgacatcgacaacctctcgtccttcctccaatcaggtctggcgcaaacagttgtctctgtgggcacgctcatcggtgtggtcaccatgctcgccatcaccgacgcacaactagcactcgttgcgctgtccgtggtgccgatcatcatcgtgctcactctcattttccgacgcatcagctccaggctgtacaccgcttcacgcgagcaagccagccaggtcaacgcggtattccacgagtccatcgccggtttacgcaccgcgcagatgcaccgcatggaagaccaagtctttgacaattatgcgggcgaagcagaggaattccgacgcctgcgtgtgaaatcccagacggccatcgccatctacttccccggccttggcgcgctctctgaaatcgcccaggcactcgtcctcggtttcggcgcactgcaagtaacgcgcggcgacatctccaccggcgtactcgtggcattcgtgctgtacatgggcctgatgttcggccccatccaacaactaagccaaatcttcgactcctaccaacaagccgccgtcggcttccgtcgcatcaccgaactgctcgcaacgcagcccagcgtccagatctgggcaccaacaggcacgctaggcaggctgccacgcagcctttattgcttgacgacgtcaccttcggctattcagacgatccgatcctagacaacgtcaccgtccagatc

SEQ ID NO: 78 - protein, 564 aa, Corynebacterium glutamicum
MGLDVSDEQIEHAARLAQAHDFIDRLPNKYEEVIGERGLTLSGGQRQRIALARAFLAHPKVLVLDDATSAIDASTEDRIFQALREELHDVTILIIAHRHSTLELGDRVGLVEDGRVTALGPLSEMRDHARFSHLMALDFQDSHDPEFTLDNGSLPSQEQLWPEVSTEKQYKILAPAPGRGRGMSMPATPELLAQIEALPAATEETRVDAGRLRTSTSGFKLLSLFKQVRWLVVAVIALLLVGVAADLAFPTLMRAAIDNGVQAQSTSTLWWIAIAGSVVVLLSWAAAAINTIITARTGERLLYGLRLRSFVHLLRLSMSYFERTMSGRIMTRMTTDIDNLSSFLQSGLAQTVVSVGTLIGVVTMLAITDAQLALVALSVVPIIIVLTLIFRRISSRLYTASREQASQVNAVFHESIAGLRTAQMHRMEDQVFDNYAGEAEEFRRLRVKSQTAIAIYFPGLGALSEIAQALVLGFGALQVTRGDISTGVLVAFVLYMGLMFGPIQQLSQIFDSYQQAAVGFRRITELLATQPSVQIWAPTGTLGRLPRSLYCLTTSPSAIQTIRS

SEQ ID NO: 79 - DNA, 1417 bp, Corynebacterium glutamicum
  CDS (101)..(1417): FRXA02096
cgcttcgacgacctcacccacagcgatatccgcaggaatctcatcgcggtttttgatgagccgttcttgtactcctcctccataccgcgagaacatctcgatgggtttggatgtcagtgatgagcagatcgaacacgcagccaggcttgcccaggctcatgattttatcgatcgccttccaaacaaatacgaggaagtcattggcgaacgcggcctgacgctttctggtggtcaacgccaacgcatcgccctcgcacgggctttcctggcgcatcccaaagtgttggtgcttgatgatgccacctctgccattgatgcctccactgaggaccgcattttccaggccttgcgcgaagaactgcacgatgtcaccattttgatcatcgcgcaccgccactccactttggagctcggcgatcgggttggtctggtcgaagatggacgggtaacagcactgggaccgttgagtgagatgcgtgatcacgctcgtttctcgcatctgatggctcttgatttccaggattctcacgatccggaattcaccctcgacaacggttcactacccagccaagagcaattgtggccggaggtctccacagaaaagcagtacaagattcttgcgcctgcccctggtcgaggccgtggcatgtccatgccagcaacccctgagctgctcgcccagattgaggcgctgccagcagcaacggaagaaacacgagttgatgccgggaggctacgcaccagtacctccggtttcaaattgctcagtttattcaagcaggtccgttggctcgtcgtcgcggtcatcgcgttgttgctggtgggcgtagccgccgatctagcatttccaacactgatgcgcgcagccatcgacaacggtgtgcaagcacaaagcacctccacgttgtggtggatcgccatcgcaggcagcgtagtagtccttctgtcctgggccgccgccgcgatcaacacgattatcacggcacgcaccggtgaacggctgctttacggcttgcgtctgcgctcatttgtgcatctattgcgcctgtccatgagctatttcgaacgcaccatgtccggccgcatcatgacgcgcatgaccaccgacatcgacaacctctcgtccttcctccaatcaggtctggcgcaaacagttgtctctgtgggcacgctcatcggtgtggtcaccatgctcgccatcaccgacgcacaactagcactcgttgcgctgtccgtggtgccgatcatcatcgtgctcactctcattttccgacgcatcagctccaggctgtacaccgcttcacgcgagcaagccagccaggtcaacgcggtattccacgagtccatcgccggtttacgcaccgcgcagatgcaccgcatggaagaccaagtctttgacaattatgcgggcgaagca

SEQ ID NO: 80 - protein, 439 aa, Corynebacterium glutamicum
MGLDVSDEQIEHAARLAQAHDFIDRLPNKYEEVIGERGLTLSGGQRQRIALARAFLAHPKVLVLDDATSAIDASTEDRIFQALREELHDVTILIIAHRHSTLELGDRVGLVEDGRVTALGPLSEMRDHARFSHLMALDFQDSHDPEFTLDNGSLPSQEQLWPEVSTEKQYKILAPAPGRGRGMSMPATPELLAQIEALPAATEETRVDAGRLRTSTSGFKLLSLFKQVRWLVVAVIALLLVGVAADLAFPTLMRAAIDNGVQAQSTSTLWWIAIAGSVVVLLSWAAAAINTIITARTGERLLYGLRLRSFVHLLRLSMSYFERTMSGRIMTRMTTDIDNLSSFLQSGLAQTVVSVGTLIGVVTMLAITDAQLALVALSVVPIIIVLTLIFRRISSRLYTASREQASQVNAVFHESIAGLRTAQMHRMEDQVFDNYAGEA

SEQ ID NO: 81 - DNA, 843 bp, Corynebacterium glutamicum
  CDS (101)..(820): RXA02562
cgggtgcgctgagggtgaggttggggcgacgaggcgtgcatggactttaggttaggttattgagcagatttatttgggcttttgtctagggtggggagctatgttcttgacaaaggtttcgctgcttgatcatccggagtcattgccggggtatttatcgagcctggcgatcgtggaatatctgcatgaacagccgttggagtttcgtgcaccgattactgtgattactggtgaaaatggggtgggtaaatccacgttggttgaggctttggcggtggggatgcgccttaatccgtctggtggctctaggcatgcaaactttggcagggaaggcgatattgtgtcgtcgcttcatcagtcgttgaagttggtgcggagagaaaaccctcgggatgcgttcttttttcggggtgagacgatgtataacgtggcttcctattatgaggagttaatgggggaaaagaacatgcatgatcttcacaagatgagccatggcgaatcggtatttgcggtgattgatcggcgttttaacaatcaaggattttttgttttggacgagcctgaggcaggcctttccatgctgaggcagttggagttgttgggaaagttgggcaaccttgctcgaggtggtgcgcagatcatcatggctacgcactctccaatattgttggctattccgggggcagagatccttgaaattacatcttcgggtgttgcaaaggtgaattttgaggatgcggaggctgttcgtgcggctcgggaatttgtggcagatccgcgaggtacggcggcgtttctgactgcggaggaggatcaccaatgatgccgtatatcaccgatatt

SEQ ID NO: 82 - protein, 240 aa, Corynebacterium glutamicum
MFLTKVSLLDHPESLPGYLSSLAIVEYLHEQPLEFRAPITVITGENGVGKSTLVEALAVGMRLNPSGGSRHANFGREGDIVSSLHQSLKLVRRENPRDAFFFRGETMYNVASYYEELMGEKNMHDLHKMSHGESVFAVIDRRFNNQGFFVLDEPEAGLSMLRQLELLGKLGNLARGGAQIIMATHSPILLAIPGAEILEITSSGVAKVNFEDAEAVRAAREFVADPRGTAAFLTAEEDHQ

SEQ ID NO: 83 - DNA, 1029 bp, Corynebacterium glutamicum
  CDS (101)..(1006): RXA00950
tctccgtacgccccacgaagacacctcgaagttcccacgcgaaatgtttcacgtgaaacatctgctgatttttgtctccaagtggagttgaatgagagttatgaacactccggcagttcaggttcaaaatctaagtttgagttttgggtcgttcacagctgtcaacggcctcagcctcacggtggagcaggggagcattcacggcttcctcggccccaacggtgcaggaaagtcaacaaccatcagggcactcattggagtgctaaaaccccaaacaggttcagtcgctattctcggccaagatcctgttgctcaccccgatgtccttcgaagagttggctacgttccaggagatgccacactgtgggacaacctcactggggcggaagttttcagggcgctcgaatcactccgcaagactccatccaaccgagctctagaaaacgagctcattgacgccttccaattggatccctcgaagaagatccgcgaatactcgacaggtaacagaaggaaagtcagtctcatcgcggcgctcagtcatgagcccgagctcctcatcgttgacgagcccaccgcaggcttggatcccatcatggagcaagtctttgtcacctatgtccgcaaggcacgaaccaacggcgcgtccgtgttactcagcagccacattctcagtgaggtggagcagctgtgtgattacgtcacggtccttaaagaggggcgagcagttgcatctaatgaggtgagctatctgaggaagatctccgctcaccgcattactgccacgattccggcggtacctcaacaccttgctggcaggggagaagtggatttcgatgctggccatctcagcatcacctgcgatgcctccgaggttcccgatattttgcgcatcatcatcgacgctggcggccaggacatcatcagcaccgcggcgtcgctggaggagatcttcttgcgtcactatggagaaaccgtgagtggttcagaaagcaaggcatcacaatgatccgtcttaatctacgtctt

SEQ ID NO: 84 - protein, 302 aa, Corynebacterium glutamicum
MNTPAVQVQNLSLSFGSFTAVNGLSLTVEQGSIHGFLGPNGAGKSTTIRALIGVLKPQTGSVAILGQDPVAHPDVLRRVGYVPGDATLWDNLTGAEVFRALESLRKTPSNRALENELIDAFQLDPSKKIREYSTGNRRKVSLIAALSHEPELLIVDEPTAGLDPIMEQVFVTYVRKARTNGASVLLSSHILSEVEQLCDYVTVLKEGRAVASNEVSYLRKISAHRITATIPAVPQHLAGRGEVDFDAGHLSITCDASEVPDILRIIIDAGGQDIISTAASLEEIFLRHYGETVSGSESKASQ

SEQ ID NO: 85 - DNA, 1764 bp, Corynebacterium glutamicum
  CDS (101)..(1741): RXA02119
ttcggtccgctctggcaaaaatggctggctgccacctcggcgcagcagcttaagggctgggcttaaattgcttgtcgacgcctagtgccacaatggagacatgaccgaaacacttgtggtgaatggccttgcaggcggctatgggcaccgcacattatttaacgatgtgaatctcaccgtagctgccggcgatgtcgtgggcgttgtcggcgtcaatggcgctggtaaatccacatttctaaaaattctggcgggcgtggaaaagccactggctggaactatcgcgctttcgccagccgatgcttttgtgggctacttgccacaggaacacacccgcacgtctggagagacgatcgcagtttacattgctcgtcgaaccggctgccaagctgcaacaactgccatggatgacaccgccgaagcgtttggtgcggatccagacaacgctgccttggccgatgcatacgccgaggcgctggatcggtggatggccagtggcgcagccgatttggatgaacgcatccccatcgtgctcgctgatttgggctttgagcttcccacctcgacgctgatggaaggactttcaggcgggcaggcagcccgggtcgggctggcggcgttactgttgtcacgttttgacattgtgcttctcgacgagcccaccaacgatttggatctcgacggtcttgagcaactggagaattttgttcaggggcttcgcgggggagtcgtactggtcagccatgatcgtgagtttctttccaggtgtgtgaccactgtgctggaactcgatctgcaccaaaattcccaccatgtttatggcggtggatatgattcctaccttgaggaacgcgcagtgctacgccagcacgcccgtgaccaatatgaggaatttgcggaaaagaagaaggaccttgtggcacgtgctcgaacgcagcgtgaatggtctagtcacggtgtccgcaatgctattaaacgtgcacctgacaacgacaaacttcggaagaaagccgctgcggaatccagtgaaaagcaggctcaaaaagtccgccagatggaaagccgcatcgctcggttagaagaagttgaagagccacgtaaagaatggaaactgcagttcagcgtcggtaaggcgtcgcggtcaagttctgttgtttccacgttgaatgatgcaagcttcacccaaggcgatttcaccttgggaccagtatccatccaagtaaatgctggcgatcgcattggcatcacaggacccaacggtgctggtaaatccacattgctgcgcggactattgggaaaccaagaacccaccagcggtactgccacgatgggcacgagcgtggcgatcggagaaatcgatcaggcacgagcgttacttgatccacagttgccactgatttctgcgtttgaaaagcatgttccagacttaccgatcagtgaggtgcgcacactgctcgcgaaatttgggctgaatgataatcatgtggaacgggacgtcgaaaagctatctcctggcgagcgcacgcgcgccggacttgcgctgctacaggtgcggggcgtcaacgtgcttgttcttgatgagcccaccaaccaccttgacctggaggccatcgagcaattggagcaagcgttggcctcgtatgatggtgtgttgctgctggtcacgcacgatcgtcgcatgttggacgctgtgcagaccaatcgtcgttggcatgtcgaggctggcgaagttagggagctataaccgtttccgtattgatgcca

SEQ ID NO: 86 - protein, 547 aa, Corynebacterium glutamicum
MTETLVVNGLAGGYGHRTLFNDVNLTVAAGDVVGVVGVNGAGKSTFLKILAGVEKPLAGTIALSPADAFVGYLPQEHTRTSGETIAVYIARRTGCQAATTAMDDTAEAFGADPDNAALADAYAEALDRWMASGAADLDERIPIVLADLGFELPTSTLMEGLSGGQAARVGLAALLLSRFDIVLLDEPTNDLDLDGLEQLENFVQGLRGGVVLVSHDREFLSRCVTTVLELDLHQNSHHVYGGGYDSYLEERAVLRQHARDQYEEFAEKKKDLVARARTQREWSSHGVRNAIKRAPDNDKLRKKAAAESSEKQAQKVRQMESRIARLEEVEEPRKEWKLQFSVGKASRSSSVVSTLNDASFTQGDFTLGPVSIQVNAGDRIGITGPNGAGKSTLLRGLLGNQEPTSGTATMGTSVAIGEIDQARALLDPQLPLISAFEKHVPDLPISEVRTLLAKFGLNDNHVERDVEKLSPGERTRAGLALLQVRGVNVLVLDEPTNHLDLEAIEQLEQALASYDGVLLLVTHDRRMLDAVQTNRRWHVEAGEVREL

SEQ ID NO: 87 - DNA, 981 bp, Corynebacterium glutamicum
  CDS (101)..(958): RXA01185
tcagctggtagcgtcgcatgtattattggtgcttttcactaatagcaatgcactaacgcacatagccgccgacacgtgaatcgaaagaagttcatctccgatgactgatcctgaaaactcgcaaggaaccccacagatttgtccgactgatccgactacgcaagcattagcagttcggggcttaaccaagtcctatggtgatgcaacagtagtgaacaatatcaatctggacatccccaaaggagccatttacggcatcgttggacctaatggtgcaggtaaaaccaccatgctgtccatggcaacgggtttactgaggccgaataaaggcaccgcgtggatttcgggtttcaatgtgtgggaagagccaaacgatgcaaaacgaagcatgggattgttggcagatggcttgcccatctttgatcgcttgactggcaaagaactgctcacatatgtcggggcattgcgtgagttggatgaaggcattgttgatcaacgtagtgaggaattgctggaggccctcgggcttaaagaagcagcgggcaagagagtcgtcgactattccgccggcatgacgaagaagattcttttggcccaggccctcattcacaatccgaaagtgctcatccttgatgaacctttggaagcggttgatccggtgtctggtcgtttgattcagcagattttgaagaactttgcgcaaacgggtggaaccgtcgttttgagttcgcatgtcatggaattggttgaggggttgtgcgatcacgttgccatcatcaacaggggagtggtggagattgccggacatgtgaatgaggttcgtcggggcagatcttaccggatgtcttcgttaatgcggttgaaggcgctgctcttcaagaggggtcactatcttggttgggtgcgtccgaaggccatagcgaaggccaaaatcagaacgaggatcgggctgagtaaatgactaaaacacttctgaaacta

SEQ ID NO: 88 - protein, 286 aa, Corynebacterium glutamicum
MTDPENSQGTPQICPTDPTTQALAVRGLTKSYGDATVVNNINLDIPKGAIYGIVGPNGAGKTTMLSMATGLLRPNKGTAWISGFNVWEEPNDAKRSMGLLADGLPIFDRLTGKELLTYVGALRELDEGIVDQRSEELLEALGLKEAAGKRVVDYSAGMTKKILLAQALIHNPKVLILDEPLEAVDPVSGRLIQQILKNFAQTGGTVVLSSHVMELVEGLCDHVAIINRGVVEIAGHVNEVRRGRSYRMSSLMRLKALLFKRGHYLGWVRPKAIAKAKIRTRIGLSK

SEQ ID NO: 89 - DNA, 1203 bp, Corynebacterium glutamicum
  CDS (101)..(1180): RXN00412
cttttgacgaacaccacgtcgcgtacgcttcctcggggcgttaaactatttgtcttccagcttttgtcccccgacttttgtacgaatcgaggacaccgtcgtgtcacacaccgcgtccacaccgacgccagaggaatactccgcgcagcaacccagcacccagggcactcgcgttgagttccgcggcataaccaaagtctttagcaacaataaatctgctaaaaccaccgcgcttgataatgtcactctcaccgtagaacccggtgaggtaatcggcatcatcggttactctggcgccggcaagtccactcttgtccgcctcatcaatggccttgactcccccacgagcggttcgttgctgctcaacggcaccgacatcgtcggaatgcccgagtctaagctgcgtaaactgcgcagtaatatcggcatgattttccagcagttcaacctgttccagtcgcgtactgcggctggaaatgtggagtacccgctggaagttgccaagatggacaaggcagctcgtaaagctcgcgtgcaagaaatgctcgagttcgtcggcctgggcgacaaaggcaaaaactaccccgagcagctgtcgggcggccagaagcagcgcgtcggcattgcccgtgcactggccaccaatccaacgcttttgcttgccgacgaagccacctccgctttggacccagaaaccacccatgaagttctggagctgctgcgcaaggtaaaccgcgaactgggcatcaccatcgttgtgatcacccacgaaatggaagttgtgcgttccatcgcagacaaggttgctgtgatggaatccggcaaagttgtggaatacggcagcgtctacgaggtgttctccaatccacaaacacaggttgctcaaaagttcgtggccaccgcgctgcgtaacaccccagaccaagtggaatcggaagatctgcttagccatgagggacgtctgttcaccattgatctgactgaaacgtccggcttctttgcagcaaccgctcgtgctgccgaacaaggtgcttttgtcaacatcgttcacggtggcgtgaccaccttgcaacgccaatcatttggcaaaatgactgttcgactcaccggcaacaccgctgcgattgaagagttctatcaaaccttgaccaagaccacgaccatcaaggagatcacccgatgaacgagatgatcctcgcagct

SEQ ID NO: 90 - protein, 360 aa, Corynebacterium glutamicum
VSHTASTPTPEEYSAQQPSTQGTRVEFRGITKVFSNNKSAKTTALDNVTLTVEPGEVIGIIGYSGAGKSTLVRLINGLDSPTSGSLLLNGTDIVGMPESKLRKLRSNIGMIFQQFNLFQSRTAAGNVEYPLEVAKMDKAARKARVQEMLEFVGLGDKGKNYPEQLSGGQKQRVGIARALATNPTLLLADEATSALDPETTHEVLELLRKVNRELGITIVVITHEMEVVRSIADKVAVMESGKVVEYGSVYEVFSNPQTQVAQKFVATALRNTPDQVESEDLLSHEGRLFTIDLTETSGFFAATARAAEQGAFVNIVHGGVTTLQRQSFGKMTVRLTGNTAAIEEFYQTLTKTTTIKEITR

SEQ ID NO: 91 - DNA, 1203 bp, Corynebacterium glutamicum; identical to SEQ ID NO: 89
  CDS (101)..(1180): FRXA00412

SEQ ID NO: 92 - protein, 360 aa, Corynebacterium glutamicum; identical to SEQ ID NO: 90

SEQ ID NO: 93 - DNA, 2340 bp, Corynebacterium glutamicum
  CDS (101)..(2317): RXN02925
aaaccgtccaccgggcaattgaggagaccggctacaccgtcttgtcctgatcgattcacccatcatctcgaccccgaccgggttgagcggaaggaacctcatgagcactccccaccaccacggtgatcaccccgctccggaaacagaccacacccaccacccgaatcatgccggtcacgagcaccatgcggatgccgccacccacggccaggccatgccgcacgatcatccgcattccactgtcgatgaagaacatcaggtccacagtcacggtgaacacgccggccacagcgccgcgatgttccgggaccgcttctggtggtcgctgatcctgtcggttccggtggtgttcttcagcccgatgttcgccgacctgctgggatataatattccggagattccgggagcctactggattcctccggtcctgggcacgatcatcttcctctacggcggcacccccttcctcaagggcgcaatgaccgagctgaaatcccgccaaccgggcatgatgctcctgatcgccatggcgatcaccgtggcgtttatcgcctcctgggtcaccaccctggggctgggcgggttccacctagatttctggtgggaactggccctgctggtgaccatcatgctgttgggccactggctggagatgcgcgctcttggtgcagcctcctccgcgcttgacgcgctggcagcgctcctgcccgatgaggccgagaaggtcgtcgacgggaccacccgcaccgtagcgatctcagagctggccgtcgacgatgtcgtgctggtccgagcaggtgcccgcgtcccggccgacgggaccatcatcgacggagcggccgaattcgatgaggccatgatcaccggcgaatcccgacccgtctaccgggataccggtgagaccgtggtggccggcaccgtggccaccgacaacaccgtccgtatccgggtggaggccaccggtggggacaccgccctggcaggcatccagcgcatggtcgccgacgcccaggcctcctcctcccgggcccaggccctggccgatcgagccgcagccttactgttctggttcgccctgatcacggccctgatcaccgccgtggtctggaccatcatcggcagccccgacgatgccgtggtccgcgcggtgaccgtgctgatcatcgcctgcccgcacgccctgggcctggccatcccgctggtcatcgcgatctcctccgagcgcgccgcgaaatccggggtgctcatcaaggaccgcatggcactcgagcacatgcgcaccatcgacgtcgtcttgttcgataagaccggcaccctgaccgaaggcgcacacgccgtcaccggcgtggctccggccacgggtatcgccgagggtgagctgctggccctggccgccgccgctgaggccgatagtgagcaccccgtggcccgcgcgatcgtgactgccgcggccgcacacccggaggcctcgcagcgtcagctgcgcgcaaccggtttcaccgccgcctccggccgcgggatccgggccaccgtcgacggtgccgaaatcctcgtgggcgggccgaacatgctacgcgagttcaatctgaccaccccgggtgagctcgccgacatcaccggttcctgggcacagcgaggtgccggagtgctacatgtcgtccgcgacggtgagatcatcggtgcggtggcagtggaggacaaaatccgccccgaatcccgcgcggcggtacgcgccctgcaggcccgcggggtgaaggtggcgatgatcaccggtgacgccacccaggtcgcccaggcagtgggcaaggatctggggatcgatgaggtcttcgccgaggttctgccgcaggacaaggacaccaaggtcacccagctgcaggagcgcggtctgagcgtggccatggtcggcgacggtgtcaatgacgccccggccctggcccgggccgaggtcggtattgcgattggcgcgggtacagatgtggcgatggagtccgccggggtggtcctggccagtgatgatccccgggccgtgctgtcgatgatcgagctctcccatgccagctaccgcaagatggtccagaacctggtctgggcgaccgggtacaacatcgtggccgttccgctggccgccggtgtgctcgcccctatcggtgtgctgcttcccccggcggcggccgccatcttgatgtccctgtccacgatcatcgtcgccctcaacgcccagctgctacgccggatcgacctggacccggctcacctagctccgaccgacgggaaggaggagaaggctgctgtgagctctgcagcccccgtccgctgactttcaatgcttcatggact

SEQ ID NO: 94 - protein, 739 aa, Corynebacterium glutamicum
MSTPHHHGDHPAPETDHTHHPNHAGHEHHADAATHGQAMPHDHPHSTVDEEHQVHSHGEHAGHSAAMFRDRFWWSLILSVPVVFFSPMFADLLGYNIPEIPGAYWIPPVLGTIIFLYGGTPFLKGAMTELKSRQPGMMLLIAMAITVAFIASWVTTLGLGGFHLDFWWELALLVTIMLLGHWLEMRALGAASSALDALAALLPDEAEKVVDGTTRTVAISELAVDDVVLVRAGARVPADGTIIDGAAEFDEAMITGESRPVYRDTGETVVAGTVATDNTVRIRVEATGGDTALAGIQRMVADAQASSSRAQALADRAAALLFWFALITALITAVVWTIIGSPDDAVVRAVTVLIIACPHALGLAIPLVIAISSERAAKSGVLIKDRMALEHMRTIDVVLFDKTGTLTEGAHAVTGVAPATGIAEGELLALAAAAEADSEHPVARAIVTAAAAHPEASQRQLRATGFTAASGRGIRATVDGAEILVGGPNMLREFNLTTPGELADITGSWAQRGAGVLHVVRDGEIIGAVAVEDKIRPESRAAVRALQARGVKVAMITGDATQVAQAVGKDLGIDEVFAEVLPQDKDTKVTQLQERGLSVAMVGDGVNDAPALARAEVGIAIGAGTDVAMESAGVVLASDDPRAVLSMIELSHASYRKMVQNLVWATGYNIVAVPLAAGVLAPIGVLLPPAAAAILMSLSTIIVALNAQLLRRIDLDPAHLAPTDGKEEKAAVSSAAPVR

SEQ ID NO: 95 - DNA, 1308 bp, Corynebacterium glutamicum
  CDS (50)..(1285): RXN00939
gaattccaccctggacaaagatcatcccaccgtgtcgaagacgcccaggatgacaaggcaaaaaacccagccgttcctggagaaattctcgaagtactacacccccggcgtcatgatcgccgccctggccgtcggcctgatcaccctgaacgttgaactggccctgaccctgctggtcatcgcctgcccgggtgccctggtcatctcgatcccggtctcgatcgtcgccggtatcggccgctccgccaaggacggcgtcctgatcaagggcggggaatacctggagacctccgcgaaggtcgacaccgtagtcgtcgacaagaccggcaccctgaccaacggccgccccgagctgaccaacgtcgacgtccttgaccccgcctactcggacgatgaggtgctcaccctggccgcccgcgcggaaaccgcctccgagcaccccctggccgaggccatcatccgcggcgcggagaacaggggcttgaccgtggcgatggtagaaaaggccgaaccggtcgccggccgcggcatccgcgctgacgtggacggtgccaccgtggccgtgggctcagccgacctgctcgatcacaccccggataacacccgcattctcgagctcaacgaacagggcaggaccgccatgtacgtcggcatcaacggcaaggccgtgggcatcgtcgctgtggccgacaccatccgagatgatgccccggccgcgatcaggtccctgcacaataagggaatccgcgtggtcatggccaccggtgatgccgaacgcgtcgcccgcaacgtcgccgccgagctcggtgtcgatgaggtgagggcagaactgatgcctgaggacaagctcgagatcgtcaaggagctgcaggcgcagggccgggtcgtggccatggttggcgacggtgtcaatgacaccccggcactggccaccgcggacatcggtgtggcgatgggtgcggccggttcgcctgccgccatcgagaccgccgatatcgccctgatggccgacaagctgccgcggctgccctacgccctgggtctggcccagcgcacggtgcgcaccatgcgggtcaacatcggcatcgccctgctcactgtcacgatcctgctggccggtgtcctgctcggtggagtgaccatgtcgattggcatgctcgtccacgaggcctccgtcctgctggtcatcgcgattgcgatgctcctgctgcgccccaccctgaaggaagacaaggacaaggcagacgtcagtactgctgacgccgcgaaggagacgctgagcgcctaacgacacaatcgccacagcca

SEQ ID NO: 96 - protein, 412 aa, Corynebacterium glutamicum
MTRQKTQPFLEKFSKYYTPGVMIAALAVGLITLNVELALTLLVIACPGALVISIPVSIVAGIGRSAKDGVLIKGGEYLETSAKVDTVVVDKTGTLTNGRPELTNVDVLDPAYSDDEVLTLAARAETASEHPLAEAIIRGAENRGLTVAMVEKAEPVAGRGIRADVDGATVAVGSADLLDHTPDNTRILELNEQGRTAMYVGINGKAVGIVAVADTIRDDAPAAIRSLHNKGIRVVMATGDAERVARNVAAELGVDEVRAELMPEDKLEIVKELQAQGRVVAMVGDGVNDTPALATADIGVAMGAAGSPAAIETADIALMADKLPRLPYALGLAQRTVRTMRVNIGIALLTVTILLAGVLLGGVTMSIGMLVHEASVLLVIAIAMLLLRPTLKEDKDKADVSTADAAKETLSA

SEQ ID NO: 97 - DNA, 191 bp, Corynebacterium glutamicum
  CDS (1)..(168): FRXA00939
ggtgtcctgctcggtggagtgaccatgtcgattggcatgctcgtccacgaggcctccgtcctgctggtcatcgcgattgcgatgctcctgctgcgccccaccctgaaggaagacaaggacaaggcagacgtcagtactgctgacgccgcgaaggagacgctgagcgcctaacgacacaatcgccacagcca

SEQ ID NO: 98 - protein, 56 aa, Corynebacterium glutamicum
GVLLGGVTMSIGMLVHEASVLLVIAIAMLLLRPTLKEDKDKADVSTADAAKETLSA

SEQ ID NO: 99 - DNA, 2388 bp, Corynebacterium glutamicum
  CDS (101)..(2365): RXN01323
cacgtggtttacgccaggcatgttcccgcgaagggttgacccatacccctagggggtatacagtgagtcatgtaaacatactcgcagaaggagcgatcccatggctcagacacccgccaaaatcccggcggcactgaatttcattgacgtcgacctcggcgttaccggcatgacctgcacttcttgctccgcccgcgtcgagcgcaaactgaacaagctcgacggcgttgaagcaaccgtcaactacgcgacggaatccgcacaggtcagctacgacccctcaaaggtcagccctgaacagctgattaagactgttgaggacaccggctacggtgctttcacgatggcttccgcagctgccgaatcagaagaggacaacgctccagctgacagcggccagtcccgcatcgacgcagctcgcgaccacgaagcagccgacctgaaacaccgcgtgatcgtctctgcactgttgtcagttcctgtggttttggtcagcatgatcccggcgctgcaattcaacaactggcagtgggccgtactcactttggtcaccccgattttcttctggggcggttcaccgttccacaaggcaacgtgggcaaacctgaagcgcggttccttcaccatgaacaccctggtttcactcggcacgtccgctgctgacctgtggtccctgtgggctttgttcattgaaaatgctggtcaccctggcatgaagatggagatgcacctgctgccgtcggcctccacgatggatgagatttacctcgaaaccgtcgcggtcgttattacgttcctgctgcttggacgctggtttgagacaaaagctaagggccaatcttcggaagctctgcgcaagctgctggacatgggcgccaaagatgcagtcgtcttacgtgacggcgccgaagtccgcgttcctgtgaatcagcttaaactcggcgacgttttcatcacccgccccggcgagaaaatcgccaccgacggtgaagtcgacgaaggttcctccgcagtcgacgaatccatgctcaccggcgaatccatccccgttgaagtcaccaagggctccaaagttaccggcgcaacgctgaacacttccggccgcctcatggtgaaagtaacccgcatcggcgccgacaccaccctgtcgcaaatggctaaactggtcacggacgcacagtccaaaaaggcccctgtccagcgtcttgttgaccaaatctcgcaggttttcgttcccgttgtcatcgtaattgctattgcgacgctgatcgcgcacctcgtcttcaccgacgccggcctcgccccagcattcaccgcagcagtcgccgtcctcattatcgcctgcccttgtgccctcggcctggcaaccccaaccgcacttctggtcggaaccggccgcggcgcgcaacttggtctgttgatcaagggccctgaaatcctcgaatccaccaaaaaagtcgacaccatcgtcctcgacaaaaccggcaccgtcaccaccggcaccatgtccgtcaccgacgtcaccgccatcaactacagcgaaaccgaaatcctcgaattcgctgcagccgtcgagtccgcctccgaacaccccatcgcccaggcaatcgccaaggccgccgaacacgagcaagtcaccgacttccaaaacaccgcaggtcaggaagtcaccggtgtagtccgcggacacgaggtccgcgtgggcaggccttcaagcacgcttatcgacgccctcctccaccccttccaacacgcccaaaaaatcggcggaacccccgtagtcgtcacgattgacggcgtagattccggaataatcacggtccgcgacaccgtcaaagacacctccgccgaagcaatccgcggactcaaggaactgggactcaccccaatcctactcaccggagacaatgaaggcgcagctaaatccgtagccgctgaagtcggcatcgaccaagtcatcgccaacgtcctcccccacgaaaaagtccaaaacgtagaagccctccaagcacaaggcaaaaacgttgcgatggtcggcgacggcgtcaacgatgccgcagctcttgcccaagctgacctcggactcgccatgggagccggcaccgacgtagccatcgaagcctccgacatcaccctcatgaacaacgacctccgatccgcagtcgacgccatccgactgtcccgtaaaaccctcggcaccatcaagggaaaccttttctgggctttcgcctacaatgttgcactaatcccagtagcggcgatcggactcctcaacccaatgcttgccggcattgcgatggccttcagttcagttttcgtcgtctccaattccttgcgtctgcgaggattcaaagcaaggagcaactaatgtccaacagcgaatgccac

SEQ ID NO: 100 - protein, 755 aa, Corynebacterium glutamicum
MAQTPAKIPAALNFIDVDLGVTGMTCTSCSARVERKLNKLDGVEATVNYATESAQVSYDPSKVSPEQLIKTVEDTGYGAFTMASAAAESEEDNAPADSGQSRIDAARDHEAADLKHRVIVSALLSVPVVLVSMIPALQFNNWQWAVLTLVTPIFFWGGSPFHKATWANLKRGSFTMNTLVSLGTSAADLWSLWALFIENAGHPGMKMEMHLLPSASTMDEIYLETVAVVITFLLLGRWFETKAKGQSSEALRKLLDMGAKDAVVLRDGAEVRVPVNQLKLGDVFITRPGEKIATDGEVDEGSSAVDESMLTGESIPVEVTKGSKVTGATLNTSGRLMVKVTRIGADTTLSQMAKLVTDAQSKKAPVQRLVDQISQVFVPVVIVIAIATLIAHLVFTDAGLAPAFTAAVAVLIIACPCALGLATPTALLVGTGRGAQLGLLIKGPEILESTKKVDTIVLDKTGTVTTGTMSVTDVTAINYSETEILEFAAAVESASEHPIAQAIAKAAEHEQVTDFQNTAGQEVTGVVRGHEVRVGRPSSTLIDALLHPFQHAQKIGGTPVVVTIDGVDSGIITVRDTVKDTSAEAIRGLKELGLTPILLTGDNEGAAKSVAAEVGIDQVIANVLPHEKVQNVEALQAQGKNVAMVGDGVNDAAALAQADLGLAMGAGTDVAIEASDITLMNNDLRSAVDAIRLSRKTLGTIKGNLFWAFAYNVALIPVAAIGLLNPMLAGIAMAFSSVFVVSNSLRLRGFKARSN

SEQ ID NO: 101 - DNA, 2388 bp, Corynebacterium glutamicum; identical to SEQ ID NO: 99
  CDS (101)..(2365): FRXA01323

SEQ ID NO: 102 - protein, 755 aa, Corynebacterium glutamicum; identical to SEQ ID NO: 100

SEQ ID NO: 103 - DNA, 1830 bp, Corynebacterium glutamicum
  CDS (101)..(1807): RXN00702
tggcgacgatgccaggattcttgacgccccgcttgccgaagaacaaagtgagggtcaagcgtcgaaaagcaataaatagcccagaaagggccgaagtttaatgagtgctccttttagcgcgcgcactgcgtggtcgacggaccccgtgctggaactggaaagcgtcgctgcctcgtattatgacgatgagcgcacgctggcggcgccgcagatcagcgacgtgaatctgacgctttttgaaggcgaaatcctgctggttgtggggcgcaccggctccggcaaatcgacgctgctgaacgcgatgtccggcgcgatgccgcatgcgaccggcggccgacttgatgggcgcgtgcgcgtggtcggccgggatacgcgtgatttcccaccacgcatgctttccgacgtggtcggcgtcgttgggcaagatccggcggcaagttttatcaccaacacggttgaagaagaacttgcctacagcatggagcaattagggctcccacctgcggtcatgcgcaagcgcgtagaggaaacccttgatcttttaggcatcgcggagctgcgatacgtgccattggcggaactatctggtggtgagcagcagcgcgtggcgattggcgcggtgctgaccactcgccccgcgctgattatcttggatgaaccaaccagcgctttggaccctaatggtgccgaggatgtgctggcaaccgtaaccaagctggctcatgacttggcgatgaccgtagtgcttgctgaacaccgcatcgagcgcgtactgcagtacgtggaccgcgtggcgcatgtgggcgctgatgggcacgtcactgttgggacgccggaagaaatcatggctgattctgatgtggcaccacccattgtggaattaggacgctgggctggctgggctcccctaccgctatcgatccgcgatgcacgcgcacactccgctgacatgcgcaaacgcctgtatcagcgtggtttagtggtgaacaaattacacaaccacgctgtccagccacttttgatcgccgaagatatcatggttgatttccccgaaatccgtgccgttgacggcgtgaacttgaatctcaactccggtgaaattaccgtgctcatgggccgaaacggctgcggaaaatcatccctgctgtgggctttacaaggttcagggactagaaatcagggctcggtgcaggtgcttgatgaggccgcgggattttcgtggacagaccccaaaactttaaagcccgccaagcggcgcaatcttgtgtccatggttccgcaaacaccgaccgatattttgtatgaatcaaccgtgcatgcagagctcgcacgctctgataaagatgccgcagcacccgccggcaccacgcgggaaatcctggattcactggtcccgaatatcccggaccatctccacccacgtgatctatcagaaggccaaaagctctccctcgcgctgtccatccaactcgccgcaaaaccccgcgtggtatttttcgacgaacccacccgcggcctagactacgacggcaagaaatccctcgcccgctccttccaacaactcgcagacgacggccacgccattttggtggtcacccacgacgtggaattctctgcactgtgcgccgaccgagtgttgtttatggcctctggaaagatcatctccgatggcacagccgtagaaatcctccccgcatcaccggcttacgccccacaagtcgcaaaaatcaccgccggcatccaagaggaatcacactggctcacagtctcggccgtgaaagctgcgctagggcatggtgaaatctcatgatcaacgccatcacactcaag

SEQ ID NO: 104 - protein, 569 aa, Corynebacterium glutamicum
MSAPFSARTAWSTDPVLELESVAASYYDDERTLAAPQISDVNLTLFEGEILLVVGRTGSGKSTLLNAMSGAMPHATGGRLDGRVRVVGRDTRDFPPRMLSDVVGVVGQDPAASFITNTVEEELAYSMEQLGLPPAVMRKRVEETLDLLGIAELRYVPLAELSGGEQQRVAIGAVLTTRPALIILDEPTSALDPNGAEDVLATVTKLAHDLAMTVVLAEHRIERVLQYVDRVAHVGADGHVTVGTPEEIMADSDVAPPIVELGRWAGWAPLPLSIRDARAHSADMRKRLYQRGLVVNKLHNHAVQPLLIAEDIMVDFPEIRAVDGVNLNLNSGEITVLMGRNGCGKSSLLWALQGSGTRNQGSVQVLDEAAGFSWTDPKTLKPAKRRNLVSMVPQTPTDILYESTVHAELARSDKDAAAPAGTTREILDSLVPNIPDHLHPRDLSEGQKLSLALSIQLAAKPRVVFFDEPTRGLDYDGKKSLARSFQQLADDGHAILVVTHDVEFSALCADRVLFMASGKIISDGTAVEILPASPAYAPQVAKITAGIQEESHWLTVSAVKAALGHGEIS

SEQ ID NO: 105 - DNA, 1343 bp, Corynebacterium glutamicum
  CDS (1)..(1320): FRXA00702
ttagggctcccacctgcggtcatgcgcaagcgcgtagaggaaacccttgatcttttaggcatcgcggagctgcgatacgtgccattggcggaactatctggtggtgagcagcagcgcgtggcgattggcgcggtgctgaccactcgccccgcgctgattatcttggatgaaccaaccagcgctttggaccctaatggtgccgaggatgtgctggcaaccgtaaccaagctggctcatgacttggcgatgaccgtagtgcttgctgaacaccgcatcgagcgcgtactgcagtacgtggaccgcgtggcgcatgtgggcgctgatgggcacgtcactgttgggacgccggaagaaatcatggctgattctgatgtggcaccacccattgtggaattaggacgctgggctggctgggctcccctaccgctatcgatccgcgatgcacgcgcacactccgctgacatgcgcaaacgcctgtatcagcgtggtttagtggtgaacaaattacacaaccacgctgtccagccacttttgatcgccgaagatatcatggttgatttccccgaaatccgtgccgttgacggcgtgaacttgaatctcaactccggtgaaattaccgtgctcatgggccgaaacggctgcggaaaatcatccctgctgtgggctttacaaggttcagggactagaaatcagggctcggtgcaggtgcttgatgaggccgcgggattttcgtggacagaccccaaaactttaaagcccgccaagcggcgcaatcttgtgtccatggttccgcaaacaccgaccgatattttgtatgaatcaaccgtgcatgcagagctcgcacgctctgataaagatgccgcagcacccgccggcaccacgcgggaaatcctggattcactggtcccgaatatcccggaccatctccacccacgtgatctatcagaaggccaaaagctctccctcgcgctgtccatccaactcgccgcaaaaccccgcgtggtatttttcgacgaacccacccgcggcctagactacgacggcaagaaatccctcgcccgctccttccaacaactcgcagacgacggccacgccattttggtggtcacccacgacgtggaattctctgcactgtgcgccgaccgagtgttgtttatggcctctggaaagatcatctccgatggcacagccgtagaaatcctccccgcatcaccggcttacgccccacaagtcgcaaaaatcaccgccggcatccaagaggaatcacactggctcacagtctcggccgtgaaagctgcgctagggcatggtgaaatctcatgatcaacgccatcacactcaag

SEQ ID NO: 106 - protein, 440 aa, Corynebacterium glutamicum
LGLPPAVMRKRVEETLDLLGIAELRYVPLAELSGGEQQRVAIGAVLTTRPALIILDEPTSALDPNGAEDVLATVTKLAHDLAMTVVLAEHRIERVLQYVDRVAHVGADGHVTVGTPEEIMADSDVAPPIVELGRWAGWAPLPLSIRDARAHSADMRKRLYQRGLVVNKLHNHAVQPLLIAEDIMVDFPEIRAVDGVNLNLNSGEITVLMGRNGCGKSSLLWALQGSGTRNQGSVQVLDEAAGFSWTDPKTLKPAKRRNLVSMVPQTPTDILYESTVHAELARSDKDAAAPAGTTREILDSLVPNIPDHLHPRDLSEGQKLSLALSIQLAAKPRVVFFDEPTRGLDYDGKKSLARSFQQLADDGHAILVVTHDVEFSALCADRVLFMASGKIISDGTAVEILPASPAYAPQVAKITAGIQEESHWLTVSAVKAALGHGEIS

SEQ ID NO: 107 - DNA, 576 bp, Corynebacterium glutamicum
  CDS (101)..(553): RXN00828
cggtgatcaccgggccgaatggcgctggaaaatccacacttgcgctgaccatgggtggattgcttccgcgaaaagtgggcagctggaactctctgacacggtgcgcggcggccttaacacgcccccgcacaagtggcgttcagctgatctagctgcacgtattggcactgtctttcaggatccagagcaccaatttgtggcgcgcactgtgcgtgatgagctagaaattgggccgaaaatcatgaaagtcgatgcaagcgagcgcatcgaggagctgcttgatcgtttgcgcctccgccacttggaaaacgccaatccgtttaccttgagtggtggagaaaagcgccgcctatctgtggcgacagccttggtggcagcaccgaaacttctcattttggatgagcctacgtttggccaagatcccgagaccttcacagagctggtgacgatgttgcgtgaattaacagacaacggaatcagcattgtgtcggtaacccatgatcctgatttcatcgcagcgctgggcgatcaccacattgaggtgagcgcgaagtgaacctgctgatcaaaattaat

SEQ ID NO: 108 - protein, 151 aa, Corynebacterium glutamicum
VRGGLNTPPHKWRSADLAARIGTVFQDPEHQFVARTVRDELEIGPKIMKVDASERIEELLDRLRLRHLENANPFTLSGGEKRRLSVATALVAAPKLLILDEPTFGQDPETFTELVTMLRELTDNGISIVSVTHDPDFIAALGDHHIEVSAK

SEQ ID NO: 109 - DNA, 392 bp, Corynebacterium glutamicum
  CDS (1)..(369): FRXA00828
gagcaccaatttgtggcgcgcactgtgcgtgatgagctagaaattggtccgaaaatcatgaaagttgatgcaagcgagcgcatcgaggagttgcttgatcggttgcgcctccgccacttagaaaatgctaatccgtttaccttgagtggtggagaaaagcgccgcctatctgtggcgacagccttggtggcagcaccgaaacttctcattttggatgagcctacgtttggccaagatcccgagaccttcacagagctggtgacgatgttgcgtgaattaacagacaacggaatcagcattgtgtcagtaacccatgatcctgatttcatcgcagcgctgggcgatcaccacattgaggtgagcgcgaagtgaacctgctgatcaaaattaat

SEQ ID NO: 110 - protein, 123 aa, Corynebacterium glutamicum
EHQFVARTVRDELEIGPKIMKVDASERIEELLDRLRLRHLENANPFTLSGGEKRRLSVATALVAAPKLLILDEPTFGQDPETFTELVTMLRELTDNGISIVSVTHDPDFIAALGDHHIEVSAK

SEQ ID NO: 111 - DNA, 703 bp, Corynebacterium glutamicum
  CDS (101)..(703): RXN03020
cgccgcagcaggactcatcggtgccgccatttcactcggccccatccttcgcgtcgaaccacgctccgcactcatgaacgcataagaaaaggaacctcacatgactctccacgtttcaaatctcaatctgaccgtcgccgacggatccacctcacgcaccctgctcaacaacatacacttttggatgtccaaccaggcgaagtcgtcggtatcaccggcccatccggctccggaaaatccaccctactcgccgtcctcggctgcctccaaagcgcccgattccggcaccgcgacgctcggcgacatcgacctgctcaacccccaaaaccgagctgctttacgacgcaaccacctaggaattgtcttccaacagccaaacctgctcccctcgttgactgtcctcgaccaactgctgctcattccccggctcggcaggatcctcccgcccagccgcagcgcacgcacccaacacaaagacaaagccctttcacttctgaactccatcggactcggcgacttagcaaaacgcaaggtcagcgaactatccggtggacaacaagcccgcgttaacttggcccgcgcgctgatgaactcccccaagctcctgcttgtcgatgaacccaccgccgccctcgatcaacattccgccagcgaagtcaccgaactaatcgtctcgatggcccaccaatacaacgcccccaca

SEQ ID NO: 112 - protein, 201 aa, Corynebacterium glutamicum
MTLHVSNLNLTVADGSTSRTLLNNIHFWMSNQAKSSVSPAHPAPENPPYSPSSAASKAPDSGTATLGDIDLLNPQNRAALRRNHLGIVFQQPNLLPSLTVLDQLLLIPRLGRILPPSRSARTQHKDKALSLLNSIGLGDLAKRKVSELSGGQQARVNLARALMNSPKLLLVDEPTAALDQHSASEVTELIVSMAHQYNAPT

SEQ ID NO: 113 - DNA, 614 bp, Corynebacterium glutamicum
  CDS (1)..(591): RXN00726
aacgcgggtcgcttgtatgtcgatggcgatctcattggctaccgagagcgcgatggcgtgctgtacgaaatctctgagaaggacgccgccaagcagcgctccgatatcggcatggtgttccagaacttcaacctcttcccccaccgcacggtgatcgagaacatcatcgaagctcccatccacgtgaagaagcagcccgaaagcaaggcccgcgcacgtgccatggagctgcttgagcaggtcggcctcgcccacaaggcggacgcctaccccgtccaactgtcgggtggtcagcagcagcgcgttgcaattgcccgcgccgtcgccatggagccaaagctcatgcttttcgacgaacccaccagcgctttggaccctgaactcgtcggtgaagtcctgcgagtgatgaaacagctcgccgacgacggcatgaccatgcttgttgtcacccacgaaatgggcttcgcccacgaagtcgccgaccaggtcgtgttcatggccgatggagttgtcgttgaagccggaacccccgaacaagttctggacaatccaaaggaacagcgcaccaaagacttcctgtcttctctgctctaaccttttcgggtcttaaaaaa

SEQ ID NO: 114 - protein, 197 aa, Corynebacterium glutamicum
NAGRLYVDGDLIGYRERDGVLYEISEKDAAKQRSDIGMVFQNFNLFPHRTVIENIIEAPIHVKKQPESKARARAMELLEQVGLAHKADAYPVQLSGGQQQRVAIARAVAMEPKLMLFDEPTSALDPELVGEVLRVMKQLADDGMTMLVVTHEMGFAHEVADQVVFMADGVVVEAGTPEQVLDNPKEQRTKDFLSSLL

SEQ ID NO: 115 - DNA, 765 bp, Corynebacterium glutamicum
  CDS (101)..(742): RXN02570
ccattgttatgctcattgtgtttgtggtggtcaagtcgctacccaagcgcaccactagggcattggttccgcagcgggttccggaggacgtcgcttaaacatgaatcctttgacatggatcattggcgcattcagcatgtggatcgtggtgctgggcgttaataagcttggtttaagcatcgcagtgatcatcatcgcgcaggtcgtggcgatgattcgggtgcgcaatgtatctgtgttggcttcaacagcattgttatcggttcctgcattggcctcgatggcgctgattcacatgccgtattcttccgacggctggttgattgctcttaccttgacggctcgttttagtgcgttgatgtctattttcctccttgcagcaacagcgattactattcctgagctggtgaaatccctatatcgttggcccaagctggcgtatatcgtgggttctgcattgcagatgattccgcagggtaaacagaccttggcgttggttcgtgatgccaatgctttgcgcgggcgcagcgttaaaggtcccgtgcgcgcggtgaaatatgtgggtttgcccctgattacacatttacttagtgcaggtgccgcgcgagcgattcccttggaggtcgcaggcctggacaggccggggccgcgtacggtgttggttgaggtggtggaggggcgcgtcgaaaagcattgtcgctggttgttgccgcttttggcagtcgggatggcgtggtggctctaactcaaatcgtcggaccgtcc

SEQ ID NO: 116 - protein, 214 aa, Corynebacterium glutamicum
MNPLTWIIGAFSMWIVVLGVNKLGLSIAVIIIAQVVAMIRVRNVSVLASTALLSVPALASMALIHMPYSSDGWLIALTLTARFSALMSIFLLAATAITIPELVKSLYRWPKLAYIVGSALQMIPQGKQTLALVRDANALRGRSVKGPVRAVKYVGLPLITHLLSAGAARAIPLEVAGLDRPGPRTVLVEVVEGRVEKHCRWLLPLLAVGMAWWL

SEQ ID NO: 117 - DNA, 957 bp, Corynebacterium glutamicum
  CDS (101)..(934): RXN02354
gaataaagaaaaagaaactgggcggaaccaaggatgagaaacccaccgctaaggatgctgttgtaaaggccgattctgctgtgaaggaagccgctaagccatgactaaacgaacaaaaggactcatcctcaactacgccggagtggtgttcatcctcttctggggactagctcccttctactggatggttatcaccgcactgcgcgattccaagcacacctttgacaccaccccatggccaacgcacgtcaccttggataacttccgggacgcactggccaccgacaaaggcaacaacttcctcgcagccattggcaactcactggtcatcagcgtcaccacaacagcgatcgctgttctcgtgggagtgttcaccgcctacgctctagcccgactggaattcccgggcaaaggcattgtcaccggcatcatcttggcagcctccatgttccccggcatcgccctggtcactccgctgttccagctcttcggtgacctcaactggatcggcacctaccaagcgctgattatcccgaacatttccttcgcgctacctctgacgatctacacgctcgtatccttcttcaggcaactgccctgggaactcgaagaatcagcacgtgtcgacggcgccacacgtggccaagccttccgcatgatcctgcttcctctagcagcgcccgcactatttaccaccgcgatcctcgcattcattgcaacgtggaacgaattcatgctggcccgccaactatccaacacctccacagagccagtgaccgttgcgatcgcaaggttcaccggaccaagctccttcgaatacccctacgcctctgtcatggcagcgggagctttggtgaccatcccactgatcatcatggttctcatcttccaacgccgcatcgtctccggactcaccgcaggtggcgtgaaagcctagactagatactcatgagtgct

SEQ ID NO: 118 - protein, 278 aa, Corynebacterium glutamicum
MTKRTKGLILNYAGVVFILFWGLAPFYWMVITALRDSKHTFDTTPWPTHVTLDNFRDALATDKGNNFLAAIGNSLVISVTTTAIAVLVGVFTAYALARLEFPGKGIVTGIILAASMFPGIALVTPLFQLFGDLNWIGTYQALIIPNISFALPLTIYTLVSFFRQLPWELEESARVDGATRGQAFRMILLPLAAPALFTTAILAFIATWNEFMLARQLSNTSTEPVTVAIARFTGPSSFEYPYASVMAAGALVTIPLIIMVLIFQRRIVSGLTAGGVKA

SEQ ID NO: 119 - DNA, 889 bp, Corynebacterium glutamicum
  CDS (101)..(889): FRXA02354
gaataaagaaaaagaaactgggcggaaccaaggatgagaaacccaccgctaaggatgctgttgtaaaggccgattctgctgtgaaggaagccgctaagccatgactaaacgaacaaaaggactcatcctcaactacgccggagtggtgttcatcctcttctggggactagctcccttctactggatggttatcaccgcactgcgcgattccaagcacacctttgacaccaccccatggccaacgcacgtcaccttggataacttccgggacgcactggccaccgacaaaggcaacaacttcctcgcagccattggcaactcactggtcatcagcgtcaccacaacagcgatcgctgttctcgtgggagtgttcaccgcctacgctctagcccgactggaattcccgggcaaaggcattgtcaccggcatcatcttggcagcctccatgttccccggcatcgccctggtcactccgctgttccagctcttcggtgacctcaactggatcggcacctaccaagcgctgattatcccgaacatttccttcgcgctacctctgacgatctacacgctcgtatccttcttcaggcaactgccctgggaactcgaagaatcagcacgtgtcgacggcgccacacgtggccaagccttccgcatgatcctgcttcctctagcagcgcccgcactatttaccaccgcgatcctcgcattcattgcaacgtggaacgaattcatgctggcccgccaactatccaacacctccacagagccagtgaccgttgcgatcgcaaggttcaccggaccaagctccttcgaatacccctacgcctctgtcatggcagcgggagctttggtgaccatcccactgatcatcatggttctcatcttc

SEQ ID NO: 120 - protein, 263 aa, Corynebacterium glutamicum
MTKRTKGLILNYAGVVFILFWGLAPFYWMVITALRDSKHTFDTTPWPTHVTLDNFRDALATDKGNNFLAAIGNSLVISVTTTAIAVLVGVFTAYALARLEFPGKGIVTGIILAASMFPGIALVTPLFQLFGDLNWIGTYQALIIPNISFALPLTIYTLVSFFRQLPWELEESARVDGATRGQAFRMILLPLAAPALFTTAILAFIATWNEFMLARQLSNTSTEPVTVAIARFTGPSSFEYPYASVMAAGALVTIPLIIMVLIF

SEQ ID NO: 121 - DNA, 1251 bp, Corynebacterium glutamicum
  CDS (101)..(1228): RXN00001
tgtcataggcagcactctagatggcgcacagtgactcacttcactgtttctcacactacggatcgttcggcacgtacctgccgatggaggagattctgcaatggcaaccgtaacgttcaaagatgcttccctaagctacccgggagcaaaggaacccaccgtcaagaaattcaacctggaaatcgccgatggcgagttcctcgtcctcgtcggcccttccggctgtggtaaatccaccacgctgcgcatgctggccggtttggaaaacgttactgacggtgccattttcatcggagacaaggacgttacccacgttgcaccgcgtgaccgtgacatcgccatggttttccagaactatgctctctacccccacatgaccgtgggcgagaacatgggcttcgcactgaagatcgccggcaagtcccaagacgagatcaataagcgcgtcgacgaagccgccgccactttgggcctgaccgaattcttggagcgcaagccgaaggccctgtccggtggtcagcgtcagcgtgtggccatgggccgcgccattgttcgcaacccgcaggtctttctcatggatgagccgctgtctaacctcgatgccaagctgcgtgttcagacccgtacccagattgcagccctgcagcgcaagcttggggttaccaccgtttacgtcacccacgaccagacggaggccttgaccatgggtgaccgcatcgcggtgctgaaggatggctacctgcagcaggttggcgcgccccgagagctttatgaccgccccgccaacgtcttcgtcgccggcttcatcggctccccagccatgaacttgggcaccttctcggtcaaggatggtgacgctacctctggtcacgctcgcatcaagctttccccggaaaccctcgccgccatgacgccggaggataatggccgcatcaccattggtttccgcccggaggcactggagatcattccggaaggcgagtccaccgatctttccatcccaatcaagctcgacttcgtggaggaactcggttccgattccttcctctacggcaagctggtaggcgagggcgaccttggatcctccagcgaggatgtccccgagtccggccaaatcgtcgtccgcgctgctccgaacgccgcgcctgctccgggcagtgttttccacgcacgcatcgtggagggcggccagcacaacttctcggcgtcgactggcaagcgcctcccttaagcccgcgtaccggctacccc

SEQ ID NO: 122 - protein, 376 aa, Corynebacterium glutamicum
MATVTFKDASLSYPGAKEPTVKKFNLEIADGEFLVLVGPSGCGKSTTLRMLAGLENVTDGAIFIGDKDVTHVAPRDRDIAMVFQNYALYPHMTVGENMGFALKIAGKSQDEINKRVDEAAATLGLTEFLERKPKALSGGQRQRVAMGRAIVRNPQVFLMDEPLSNLDAKLRVQTRTQIAALQRKLGVTTVYVTHDQTEALTMGDRIAVLKDGYLQQVGAPRELYDRPANVFVAGFIGSPAMNLGTFSVKDGDATSGHARIKLSPETLAAMTPEDNGRITIGFRPEALEIIPEGESTDLSIPIKLDFVEELGSDSFLYGKLVGEGDLGSSSEDVPESGQIVVRAAPNAAPAPGSVFHARIVEGGQHNFSASTGKRLP

SEQ ID NO: 123 - DNA, 1251 bp, Corynebacterium glutamicum; identical to SEQ ID NO: 121
  CDS (101)..(1228): FRXA00001

SEQ ID NO: 124 - protein, 376 aa, Corynebacterium glutamicum; identical to SEQ ID NO: 122

SEQ ID NO: 125 - DNA, 1119 bp, Corynebacterium glutamicum
  CDS (101)..(1096): RXN02356
ttggcagtagccatgcgttctgctcctgaccttgaacagcggtcccaatttagacccgctaaacccacaatgtgtactggtgctggtaatttagtagaacatggcaacggtcacattcgacaaggtcacaatccggtaccccggcgcggagcgcgcaacagttcatgagcttgatttagatatcgctgatggcgagtttttggtgctcgtcggcccttcgggttgtggtaaatccactacgctgcgtgctttggcggggcttgagggcgtggagtcgggtgtgatcaaaattgatggcaaggatgtcactggtcaggagccggcggatcgcgatatcgcgatggtgttccagaattatgctctgtaccctcacatgacggtggcgaagaatatgggttttgcgctgaagttggctaagctgccgcaggcgcagatcgatgcgaaggtcaatgaggctgcggaaattcttgggttgacggagtttttggatcgcaagcctaaggatttatcgggtggtcagcgtcagcgtgtggcgatgggtcgcgcgttggtgcgtgatccgaaggtgttcctcatggatgagccgctgtccaacctggatgcgaaattgcgcgtgcaaacccgcgcggaggtcgctgctttgcagcgtcgcctgggcaccaccacggtgtatgtcacccacgatcaggttgaggcaatgacgatgggcgatcgggttgcggtgctcaaggacgggttgctgcagcaggtcgcaccgcccagggagctttacgacgccccggtcaacgaattcgttgcgggcttcatcggctcgccgtccatgaacctcttccctgccaacgggcacaagatgggtgtgcgcccggagaagatgctggtcaatgagacccctgagggtttcacaagcattgatgctgtggtggatatcgtcgaggagcttggctccgaatcgtatgtttatgccacttgggagggccaccgcctggtggcccgttgggtggaaggccccgtgccagcccctggcacgcctgtgactttttcctatgatgcggcgcaggcgcatcatttcgatctggagtcgggcgagcgtatcgcttagtttcggacgtggggaggcgt

SEQ ID NO: 126 - protein, 332 aa, Corynebacterium glutamicum
MATVTFDKVTIRYPGAERATVHELDLDIADGEFLVLVGPSGCGKSTTLRALAGLEGVESGVIKIDGKDVTGQEPADRDIAMVFQNYALYPHMTVAKNMGFALKLAKLPQAQIDAKVNEAAEILGLTEFLDRKPKDLSGGQRQRVAMGRALVRDPKVFLMDEPLSNLDAKLRVQTRAEVAALQRRLGTTTVYVTHDQVEAMTMGDRVAVLKDGLLQQVAPPRELYDAPVNEFVAGFIGSPSMNLFPANGHKMGVRPEKMLVNETPEGFTSIDAVVDIVEELGSESYVYATWEGHRLVARWVEGPVPAPGTPVTFSYDAAQAHHFDLESGERIA

SEQ ID NO: 127 - DNA, 1369 bp, Corynebacterium glutamicum
  CDS (101)..(1369): RXN02455
aagccttcgttatgggaggtctcccagacacaatcgaatacgggccggatatccatctcggctcatcaccccgctttttatcaagaaagatgaggacctcttgaagcgtcttactcgcatcgcatccatcagcatggcctccatgctcgccgccgcaagtctcgtcgcgtgctccggctccaccgacgaggaaggcgatgtttacttcctgaacttcaagcctgaacaggacgtggcataccaggaaatcgcaaaggcctacactgaagagaccggcgttaaggtcaaggtcgttactgccgcctccggctcctatgagcagaccctcaaggccgagattggcaaggacgaagccccgactctcttccaggtcaatggcccagccggcttcatcacttggcaggactacatggcagatatgtcggacaccgaggtagctaagcagctgaccgacgacattccgccgctgaccaccgaggatggcgaggtacgtggcgttccgttcgccgtcgagggcttcggcatcatctacaacgacgagatcttcgacaagtacatcgccacgtccggcgcaaagatcaagtccacggatgagatcacgagctaccagaagctcaaggaagtcgccgaggatatgcaggcaaagaaggacgagctcggtatcgaaggcgccttcgcctccacctcgctgacatccagtgaggactggcgttggcagacccacctggccaacgctccgatctggcaggagtaccaggacaagggagtcgaggacaccaacgagatcgagttctcctacaacaaggagtacaagaaccttttcgatctctaccttgagaactccaccgtagaaaagtctcttgcgccgtctaagacggtgtctgattccatggctgagttcgcacagggcaaggccgctatggttcagaacggtaactgggcatggtcccagatttccgagacttctggcaacgtggtcaaggaagacaagatcaagttcctgcccatgtacatgggtctgccagatgaagaaaagcacggcatcaacgtcggtaccgagaactatttgggcgtgaactctgaggcctccgaggtcgaccagcaggccaccaaggacttcgtggattggctgtttacctctgaagctggcaaggagcacgtggtgaaggaccttggcttcatcgcaccgttcgaaagctacaccgctgagaacaccccgaatgaccccctttctgagcaagtcgcggaagctatcgctaacaaggatctgaccacctacccgtggaacttccagtacttcccgtcccagcagttcaaggatgacttcggccaggatctgtcgcagtacgcctccggaaagctgaagtgg

SEQ ID NO: 128 - protein, 423 aa, Corynebacterium glutamicum
LKRLTRIASISMASMLAAASLVACSGSTDEEGDVYFLNFKPEQDVAYQEIAKAYTEETGVKVKVVTAASGSYEQTLKAEIGKDEAPTLFQVNGPAGFITWQDYMADMSDTEVAKQLTDDIPPLTTEDGEVRGVPFAVEGFGIIYNDEIFDKYIATSGAKIKSTDEITSYQKLKEVAEDMQAKKDELGIEGAFASTSLTSSEDWRWQTHLANAPIWQEYQDKGVEDTNEIEFSYNKEYKNLFDLYLENSTVEKSLAPSKTVSDSMAEFAQGKAAMVQNGNWAWSQISETSGNVVKEDKIKFLPMYMGLPDEEKHGINVGTENYLGVNSEASEVDQQATKDFVDWLFTSEAGKEHVVKDLGFIAPFESYTAENTPNDPLSEQVAEAIANKDLTTYPWNFQYFPSQQFKDDFGQDLSQYASGKLKW

SEQ ID NO: 129 - DNA, 1560 bp, Corynebacterium glutamicum
  CDS (101)..(1537): RXN02795
gcggtgtggcccggtgctgcgatcgctttgacggtccttggttttaatcttttcggtgatggtttacgcgatgccatcgatccaaagcgggaggtcggccgtgcttaaagtttctgatttaacggttggcaacaattttgtccacaacgtctccttcgaggtcaaccccggcgaacgcgtcggcatcatcggcgagtccggctcaggcaaatcactcaccgcgctatccatcatgggtttaactgacctgccgaccaccggccagatcaccttcaacggcaaaccctccgctacattccgtggcacccgcatcgccatggttttccaagaaccaatgagcgcactcaacccgctcatgcgcatcggccgccaaatcgaagaaatgatgaccctgcacggggcaagcaaaaaagacgcgcgggcgcgcttaaaaagcttgcttatcgacgtctccctccccgaacgcaccgcttcggcctacccacacgaactttcaggcgggcaacgccaacgcgcactaatcgcaatggcgctggccaatgatcctgacctgttgatctgcgatgaacccaccacggctttggatgtggttgtgcaaaaacaaatcgtcgatctgctgctgcgtctcaccaaagaacgtggcaccgctttattgttcatcacccacgatcttggactcatcgcgcgcacctgcgaacgcttattggtgatgaaatccggcgaaaccgtagaacgcggcgacaccgaggcaattcttcgctcccccgcccattcgtatacccaacagctccttgatgcttcaatccttgaccagccagaaatcgcctcagattctggcgcgccggtagtgattgatgtggaggaggcgtcgaaaagctttaaagaaaccaccgccctccacaaggtttcattggcggtgcgcaaaggtgacctgcttggaatagtcggcggatcaggttccggcaaaacgactctgctgaagctcatcgccggtttggataagcccacaaccggtaccgttgcggtaaccggtggtgtgcagatggtgtttcaggatccccaatcaagcctcaacccacggatgaaaatcaaagacattgtcgccgaaccactgcttggttggaacgcggcggagaaaaccacacgggttgcggaagtcatcacccaagtgggactgagccccgatgtcttagatcgctacccccacgaattctccggaggacagcgccaacgaatctccatcgccagagccctcgccatcaaaccagcgatcctgcttgccgacgaacctgtctccgccctcgatgtgtccgtacgtaaacaagtactggatcttctccaacaactcgtcgaagaatacggcatcaccttggtgttcgtctcccacgatctggcagtggtgagacacctgtgcacaaccgtgtgggtgatggaacagggacgagtccttgagcaagggcccatcgattcggtttatgatcacccacagaccgaatacaccaaggagctgcttgatgccgttccgcggttgagcctttaaaccagcgcagatgacaacgc

SEQ ID NO: 130 - protein, 479 aa, Corynebacterium glutamicum
VLKVSDLTVGNNFVHNVSFEVNPGERVGIIGESGSGKSLTALSIMGLTDLPTTGQITFNGKPSATFRGTRIAMVFQEPMSALNPLMRIGRQIEEMMTLHGASKKDARARLKSLLIDVSLPERTASAYPHELSGGQRQRALIAMALANDPDLLICDEPTTALDVVVQKQIVDLLLRLTKERGTALLFITHDLGLIARTCERLLVMKSGETVERGDTEAILRSPAHSYTQQLLDASILDQPEIASDSGAPVVIDVEEASKSFKETTALHKVSLAVRKGDLLGIVGGSGSGKTTLLKLIAGLDKPTTGTVAVTGGVQMVFQDPQSSLNPRMKIKDIVAEPLLGWNAAEKTTRVAEVITQVGLSPDVLDRYPHEFSGGQRQRISIARALAIKPAILLADEPVSALDVSVRKQVLDLLQQLVEEYGITLVFVSHDLAVVRHLCTTVWVMEQGRVLEQGPIDSVYDHPQTEYTKELLDAVPRLSL

SEQ ID NO: 131 - DNA, 1118 bp, Corynebacterium glutamicum
  CDS (1)..(1095): FRXA02795
atcgacgtctccctccccgaacgcaccgcttcggcctacccacacgaactttcaggcgggcaacgccaacgcgcactaatcgcaatggcgctggccaatgatcctgacctgttgatctgcgatgaacccaccacggctttggatgtggttgtgcaaaaacaaatcgtcgatctgctgctgcgtctcaccaaagaacgtggcaccgctttattgttcatcacccacgatcttggactcatcgcgcgcacctgcgaacgcttattggtgatgaaatccggcgaaaccgtagaacgcggcgacaccgaggcaattcttcgctcccccgcccattcgtatacccaacagctccttgatgcttcaatccttgaccagccagaaatcgcctcagattctggcgcgccggtagtgattgatgtggaggaggcgtcgaaaagctttaaagaaaccaccgccctccacaaggtttcattggcggtgcgcaaaggtgacctgcttggaatagtcggcggatcaggttccggcaaaacgactctgctgaagctcatcgccggtttggataagcccacaaccggtaccgttgcggtaaccggtggtgtgcagatggtgtttcaggatccccaatcaagcctcaacccacggatgaaaatcaaagacattgtcgccgaaccactgcttggttggaacgcggcggagaaaaccacacgggttgcggaagtcatcacccaagtgggactgagccccgatgtcttagatcgctacccccacgaattctccggaggacagcgccaacgaatctccatcgccagagccctcgccatcaaaccagcgatcctgcttgccgacgaacctgtctccgccctcgatgtgtccgtacgtaaacaagtactggatcttctccaacaactcgtcgaagaatacggcatcaccttggtgttcgtctcccacgatctggcagtggtgagacacctgtgcacaaccgtgtgggtgatggaacagggacgagtccttgagcaagggcccatcgattcggtttatgatcacccacagaccgaatacaccaaggagctgcttgatgccgttccgcggttgagcctttaaaccagcgcagatgacaacgc

SEQ ID NO: 132 - protein, 365 aa, Corynebacterium glutamicum
IDVSLPERTASAYPHELSGGQRQRALIAMALANDPDLLICDEPTTALDVVVQKQIVDLLLRLTKERGTALLFITHDLGLIARTCERLLVMKSGETVERGDTEAILRSPAHSYTQQLLDASILDQPEIASDSGAPVVIDVEEASKSFKETTALHKVSLAVRKGDLLGIVGGSGSGKTTLLKLIAGLDKPTTGTVAVTGGVQMVFQDPQSSLNPRMKIKDIVAEPLLGWNAAEKTTRVAEVITQVGLSPDVLDRYPHEFSGGQRQRISIARALAIKPAILLADEPVSALDVSVRKQVLDLLQQLVEEYGITLVFVSHDLAVVRHLCTTVWVMEQGRVLEQGPIDSVYDHPQTEYTKELLDAVPRLSL

SEQ ID NO: 133 - DNA, 1854 bp, Corynebacterium glutamicum
  CDS (101)..(1831): RXN01939
tgctgttctaccccgcaatggcacttgcactaaccgttttgagcttcatcatgatgggcgatgtcgtccgcgacgctctggatcctaagtcgaggaagcgatgaccaccaacatcccacaaacccccaaccacgagggtgaacagccactgctcgagctgaaggatctaaagatttccttcacctcctccaccggtgttgtcgacgctgtccgtggcgcaaacctcaccatttatcctggccaatctgttgccatcgtgggtgaatccggttcaggtaaatcgaccacggcaatgtcgatcatcggtctgcttccaggcaccggcaaagtgaccgaaggttccatcatgtttgatggccaagacatcacaggcttgagtaacaagcagatggaaaagtaccgcggttcagaaatcggactggtcccccaggatccgatgaccaacttgaacccggtgtggcgcatcggcacccaggtcaaggaatccctccgagccaaccacgtggttccaggctcagagatggacaagcgcgtggcagaagttctggccgaggcaggtcttcctgatgctgagcgtcgcgcaaagcagtacccacatgagttctctggcggtatgcgccagcgcgcactgatcgccattggtttggcggcacgcccgaagctcttgatcgccgacgagcccacctctgcgctggatgtcaccgtgcagcgccaaatccttgatcaccttgaaacactgaccaaggatctcggcaccgcagtgctatttattacccacgacttgggccttgccgctgagcgcgcggagcacctcgtggtgatgcaccgcggacgcatcgtggagtccgggccatcattgaagattctgcgcaatccacagcacccatatacccaacgcttggttaaggctgcgccgtctctggcttctgcacgtattcaaagtgcgcaggaacaaggcattgaatctgcagaactgctctctgcaacggccgttgctgagggcactattccagagatggaagaaaaagttatcgaggtgaaaaacctcacccgcgaatttgatatccgcggtgcccgtggcgataagaagaagctgaaggccgttgatgatgtgtccttcttcgtacgtaaaggcaccaccaccgcacttgtgggtgaatccggttcgggtaaatccaccgtggccaacatggtgctcaaccttctcgagccaaccagcggagaggtgctctacaacggcaccgatcttacgtccttgagccacaaggaaatcttccaaatgcgacgcaaactgcaggtggtgttccagaacccctacggctcgcttgatccgatgtactccatctaccggtgtattgaggaaccgctgaccatccacaaggttggtggagaccgcaaggcacgcgaagctcgcgtcgctgaacttctcgatatggtgtccatgcccaggtccaccatgcgccgctaccccaacgagctttccggtggccaacgtcagcgcatcgccatcgcccgtgcattggcactgaatccagaagtgatcgtgttggatgaagcggtttccgctttggacgtgttggttcagaaccagatcctcaccctgcttgcagaacttcagcaggaactgaagctcacctatttgttcatcacccacgacttggccgttgttcgacaaaccgccgacgatgttgtggtgatgcaaaagggacgaatcgttgaaaagggtcgtaccgacgacatcttcaacgatcctcagcagcactacacccgcgatttgatcaatgcggtacctggtctgggaatcgagttgggtactggagaaaacctggtttaacccgcacagcctcactaaac

SEQ ID NO: 134 - protein, 577 aa, Corynebacterium glutamicum
MTTNIPQTPNHEGEQPLLELKDLKISFTSSTGVVDAVRGANLTIYPGQSVAIVGESGSGKSTTAMSIIGLLPGTGKVTEGSIMFDGQDITGLSNKQMEKYRGSEIGLVPQDPMTNLNPVWRIGTQVKESLRANHVVPGSEMDKRVAEVLAEAGLPDAERRAKQYPHEFSGGMRQRALIAIGLAARPKLLIADEPTSALDVTVQRQILDHLETLTKDLGTAVLFITHDLGLAAERAEHLVVMHRGRIVESGPSLKILRNPQHPYTQRLVKAAPSLASARIQSAQEQGIESAELLSATAVAEGTIPEMEEKVIEVKNLTREFDIRGARGDKKKLKAVDDVSFFVRKGTTTALVGESGSGKSTVANMVLNLLEPTSGEVLYNGTDLTSLSHKEIFQMRRKLQVVFQNPYGSLDPMYSIYRCIEEPLTIHKVGGDRKAREARVAELLDMVSMPRSTMRRYPNELSGGQRQRIAIARALALNPEVIVLDEAVSALDVLVQNQILTLLAELQQELKLTYLFITHDLAVVRQTADDVVVMQKGRIVEKGRTDDIFNDPQQHYTRDLINAVPGLGIELGTGENLV

SEQ ID NO: 135 - DNA, 691 bp, Corynebacterium glutamicum
  CDS (101)..(691): FRXA00761
tgctgttctaccccgcaatggcacttgcactaaccgttttgagcttcatcatgatgggcgatgtcgtccgcgacgctctggatcctaagtcgaggaagcgatgaccaccaacatcccacaaacccccaaccacgagggtgaacagccactgctcgagctgaaggatctaaagatttccttcacctcctccaccggtgttgtcgacgctgtccgtggcgcaaacctcaccatttatcctggccaatctgttgccatcgtgggtgaatccggttcaggtaaatcgaccacggcaatgtcgatcatcggtctgcttccaggcaccggcaaagtgaccgaaggttccatcatgtttgatggccaagacatcacaggcttgagtaacaagcagatggaaaagtaccgcggttcagaaatcggactggtcccccaggatccgatgaccaacttgaacccggtgtggcgcatcggcacccaggtcaaggaatccctccgagccaaccacgtggttccaggctcagagatggacaagcgcgtggcagaagttctggccgaggcaggtcttcctgatgctgagcgtcgcgcaaagcagtacccacatgagttctctggcggtatgcgccaccgcgcactgatcgccattggtttggcggcacgcccgaagctcttgatcgccgacgagcccacctctgcg

SEQ ID NO: 136 - protein, 197 aa, Corynebacterium glutamicum
MTTNIPQTPNHEGEQPLLELKDLKISFTSSTGVVDAVRGANLTIYPGQSVAIVGESGSGKSTTAMSIIGLLPGTGKVTEGSIMFDGQDITGLSNKQMEKYRGSEIGLVPQDPMTNLNPVWRIGTQVKESLRANHVVPGSEMDKRVAEVLAEAGLPDAERRAKQYPHEFSGGMRHRALIAIGLAARPKLLIADEPTSA

SEQ ID NO: 137 - DNA, 626 bp, Corynebacterium glutamicum
  CDS (1)..(603): FRXA01939
tctacaagcggcaccgatcttacgtccttgagccacaaggaaatcttccaaatgcgacgcaaactgcaggtggtgttccagaacccctacggctcgcttgatccgatgtactccatctaccggtgtattgaggaaccgctgaccatccacaaggttggtggagaccgcaaggcacgcgaagctcgcgtcgttgaacttctcgatatggtgtccatgcccaggtccaccatgcgccgctaccccaacgagctttccggtggccaacgtcagcgcatcgccatcgcccgtgcattggcactgaatccagaagtgatcgtgttggatgaagcggtttccgctttggacgtgttggttcagaaccagatcctcaccctgcttgcagaacttcagcaggaactgaagctcacctatttgttcatcacccacgacttggccgttgttcgacaaaccgccgacgatgttgtggtgatgcaaaagggacgaatcgttgaaaagggtcgtaccgacgacatcttcaacgatcctcagcagcactacacccgcgatttgatcaatgcggtacctggtctgggaatcgagttgggtactggagaaaacctggtttaacccgcacagcctcactaaac

SEQ ID NO: 138 - protein, 201 aa, Corynebacterium glutamicum
STSGTDLTSLSHKEIFQMRRKLQVVFQNPYGSLDPMYSIYRCIEEPLTIHKVGGDRKAREARVVELLDMVSMPRSTMRRYPNELSGGQRQRIAIARALALNPEVIVLDEAVSALDVLVQNQILTLLAELQQELKLTYLFITHDLAVVRQTADDVVVMQKGRIVEKGRTDDIFNDPQQHYTRDLINAVPGLGIELGTGENLV

SEQ ID NO: 139 - DNA, 1047 bp, Corynebacterium glutamicum
  CDS (101)..(1024): RXN00759
tcaccttgaacacttaaaacataacttcatccggcgctttattagcttgaagcgccccgcaccataatccattccccagcaagcaaggacacccacgctcatgcttcgttacgtcgggcgacgtttgctccaaatgattccggtctttttcggagcgaccttactgatttacgccctcgtgttcctcatgcctggtgacccagtccaggcattgggaggtgaccgcggcctaaccgaggctgcggccgagaaaatccgtcaagaatacaatcttgataaacccttcatcgttcaatacctcctgtacatcaagggcatcttcgtcttagattttggaacaaccttctctggtcagccagttattgatgtgatggccagggccttccccgtcaccatcaaactcgccatcatggccctgctgtttgaatcaatcctcggcattatctttggtgtcatcgcaggtattcgccgcggaggaatcttcgactccaccgtgctggtcctttctctgatagtcatcgcagtccccaccttcgtcattggtttcgtgctgcagttcttagtcggcgtgaaatggggcttactgcccgtcaccgtaggttccaacacatcaataacggcgctgatcatgccggctgtcgtactgggtgcagtatcgttcgcctacgttcttcgcctcaccagacaatccgtgagcgaaaacctccgcgctgattacgttcgaaccgctcgagcaaaaggcatgtccggattcaacgtgatgaaccgccatgtgcttcgaaactcactgattcccgttgccaccttcctgggcgccgatctcggtgcactgatgggtggagcgattgtcaccgaaggtatcttcggcatcaacggtgtcggtggaacgctctaccaggccattttgaaaggtgaacccaccacggttgtctccattgtcactgtgctggtcatcgtctacatcatcgccaaccttctcgtggacttgatctacgccgttctcgatccgaggatccgctatgcctaataatgaattccacacaaacc

SEQ ID NO: 140 - protein, 308 aa, Corynebacterium glutamicum
MLRYVGRRLLQMIPVFFGATLLIYALVFLMPGDPVQALGGDRGLTEAAAEKIRQEYNLDKPFIVQYLLYIKGIFVLDFGTTFSGQPVIDVMARAFPVTIKLAIMALLFESILGIIFGVIAGIRRGGIFDSTVLVLSLIVIAVPTFVIGFVLQFLVGVKWGLLPVTVGSNTSITALIMPAVVLGAVSFAYVLRLTRQSVSENLRADYVRTARAKGMSGFNVMNRHVLRNSLIPVATFLGADLGALMGGAIVTEGIFGINGVGGTLYQAILKGEPTTVVSIVTVLVIVYIIANLLVDLIYAVLDPRIRYA

SEQ ID NO: 141 - DNA, 1047 bp, Corynebacterium glutamicum
  CDS (101)..(1024): FRXA00759
  misc_feature 563: n = a, t, c, or g
  VARIANT 155: Xaa = Phe, Leu, Ile, or Val
tcaccttgaacacttaaaacataacttcatccggcgctttattagcttgaagcgccccgcaccataatccattccccagcaagcaaggacacccacgctcatgcttcgttacgtcgggcgacgtttgctccaaatgattccggtctttttcggagcgaccttactgatttacgccctcgtgttcctcatgcctggtgacccagtccaggcattgggaggtgaccgcggcctaaccgaggctgcggccgagaaaatccgtcaagaatacaatcttgataaacccttcatcgttcaatacctcctgtacatcaagggcatcttcgtcttagattttggaacaaccttctctggtcagccagttattgatgtgatggccagggccttccccgtcaccatcaaactcgccatcatggccctgctgtttgaatcaatcctcggcattatctttggtgtcatcgcaggtattcgccgcggaggaatcttcgactccaccgtgctggtcctttctctgatagtcatcgcagtccccaccttcgtcattggtttcgtgctgcagttcttantcggcgtgaaatggggcttactgcccgtcaccgtaggttccaacacatcaataacggcgctgatcatgccggctgtcgtactgggtgcagtatcgttcgcctacgttcttcgcctcaccagacaatccgtgagcgaaaacctccgcgctgattacgttcgaaccgctcgagcaaaaggcatgtccggattcaacgtgatgaaccgccatgtgcttcgaaactcactgattcccgttgccaccttcctgggcgccgatctcggtgcactgatgggtggagcgattgtcaccgaaggtatcttcggcatcaacggtgtcggtggaacgctctaccaggccattttgaaaggtgaacccaccacggttgtctccattgtcactgtgctggtcatcgtctacatcatcgccaaccttctcgtggacttgatctacgccgttctcgatccgaggatccgctatgcctaataatgaattccacacaaacc

SEQ ID NO: 142 - protein, 308 aa, Corynebacterium glutamicum
  VARIANT 155: Xaa = Phe, Leu, Ile, or Val
MLRYVGRRLLQMIPVFFGATLLIYALVFLMPGDPVQALGGDRGLTEAAAEKIRQEYNLDKPFIVQYLLYIKGIFVLDFGTTFSGQPVIDVMARAFPVTIKLAIMALLFESILGIIFGVIAGIRRGGIFDSTVLVLSLIVIAVPTFVIGFVLQFLXGVKWGLLPVTVGSNTSITALIMPAVVLGAVSFAYVLRLTRQSVSENLRADYVRTARAKGMSGFNVMNRHVLRNSLIPVATFLGADLGALMGGAIVTEGIFGINGVGGTLYQAILKGEPTTVVSIVTVLVIVYIIANLLVDLIYAVLDPRIRYA

SEQ ID NO: 143 - DNA, 912 bp, Corynebacterium glutamicum
  CDS (101)..(889): RXN00431
tggatcgtcctcgccttcacattcgtcggccttggccttgctctcctcgcgatgaagcaatggcgattccgcgtcagctactgggtataaggagcaccacatggtatccatcgatacatacaacgcctgcgtcgacttccccatcttcgacgccaaatcccgctccatgaagaaagccttcctcggcgcagccggcggagcaatcgggcgcaatcaagacaacgtcgtagtcgtcgaagcgctgaagaacgtcaacctgcacttgcgcgaaggtgaccgggtcggactcgtcggccacaacggcgccggcaaatccaccctcctgcgactcctctccggcatctacgaacccacccgcggaagcgctgacatccgtggacgcgtcgcccccgtcttcgacctcggcgtcggcatggatccagaaatctccggctacgaaaatatcatcatccgcggcctcttcctcggtcaaacccgcaaacagatgaaagccaaaatggaagaaatcgccgacttcaccgaactcggcgaatacctctccatgcctctccgaacctactccaccggcatgcgcatccgcctagccctcggcgtggtcacctccatcgagcccgaaattctgcttcttgatgaaggcatcggcgccgtcgacgccgccttcatggccaaagcccgcgaccgcctccaagccctcgtcgaacgatccggcatcctcgtcttcgcctcccactccaacgacttcctcgcccaactctgcaacaccgcactctgggtcgaccacggacaaatccgcgaagcgggactagttccagacgtggtggaagcctacgaaggcaagggcgccggcgaccacgtccgcagactcctcacccgcatggaagaagaaaagtagctcctgcgtttcgggtttgc

SEQ ID NO: 144 - protein, 263 aa, Corynebacterium glutamicum
MVSIDTYNACVDFPIFDAKSRSMKKAFLGAAGGAIGRNQDNVVVVEALKNVNLHLREGDRVGLVGHNGAGKSTLLRLLSGIYEPTRGSADIRGRVAPVFDLGVGMDPEISGYENIIIRGLFLGQTRKQMKAKMEEIADFTELGEYLSMPLRTYSTGMRIRLALGVVTSIEPEILLLDEGIGAVDAAFMAKARDRLQALVERSGILVFASHSNDFLAQLCNTALWVDHGQIREAGLVPDVVEAYEGKGAGDHVRRLLTRMEEEK

SEQ ID NO: 145 - DNA, 775 bp, Corynebacterium glutamicum
  CDS (101)..(775): FRXA00431
tggatcgtcctcgccttcacattcgtcggccttggccttgctctcctcgcgatgaagcaatggcgattccgcgtcagctactgggtataaggagcaccacatggtatccatcgatacatacaacgcctgcgtcgacttccccatcttcgacgccaaatcccgctccatgaagaaagccttcctcggcgcagccggcggagcaatcgggcgcaatcaagacaacgtcgtagtcgtcgaagcgctgaagaacgtcaacctgcacttgcgcgaaggtgaccgggtcggactcgtcggccacaacggcgccggcaaatccaccctcctgcgactcctctccggcatctacgaacccacccgcggaagcgctgacatccgtggacgcgtcgcccccgtcttcgacctcggcgtcggcatggatccagaaatctccggctacgaaaatatcatcatccgcggcctcttcctcggtcaaacccgcaaacagatgaaagccaaaatggaagaaatcgccgacttcaccgaactcggcgaatacctctccatgcctctccgaacctactccaccggcatgcgcatccgcctagccctcggcgtggtcacctccatcgagcccgaaattctgcttcttgatgaaggcatcggcgccgtcgacgccgccttcatggccaaagcccgcgaccggctccaagccctcgtcgaacgatccggcatcctcgtcttcgcctccactcaacgactttcttgccaactctgcaacaccgcactctgggtcgac

SEQ ID NO: 146 - protein, 225 aa, Corynebacterium glutamicum
MVSIDTYNACVDFPIFDAKSRSMKKAFLGAAGGAIGRNQDNVVVVEALKNVNLHLREGDRVGLVGHNGAGKSTLLRLLSGIYEPTRGSADIRGRVAPVFDLGVGMDPEISGYENIIIRGLFLGQTRKQMKAKMEEIADFTELGEYLSMPLRTYSTGMRIRLALGVVTSIEPEILLLDEGIGAVDAAFMAKARDRLQALVERSGILVFASTQRLSCQLCNTALWVD

SEQ ID NO: 147 - DNA, 1670 bp, Corynebacterium glutamicum
  CDS (1)..(1647): RXN00732
aatcacctcctcctactccccacggtaaaggcagacatcattgacaatggtgtggtcacaggtgacatcggctatatttggcacaccggtggaatcatgctggccctgacattagtccaggttgcctgcgctatcgccggtgtttatttcggttccaaactatccatgagagtgggccgcgatctgcgttcggcgatctttggcaaggtagtgaacttctctgagcgtgagatgggtcagtttggcgcaccgtcgctgatcacccgaaacaccaacgatgtgcagcaggttcagatgctggtgcagatgacctccactttgatgatttccgccccgatgctggccattggtggcatcatcatggcggtgcgtcaggatcttggtttgtcttggctgatggtggtcagtattccggtgctcatcatcgtggtggcgctgatcattgtgcgcatggttccgttgttccaaaccatgcaaaagcgcattgaccgcatcaatcagattatacgcgagcagctcaccggtatccgcgtgatccgcgcgttcgtgcgtgaagatgtggaacgcgaacgattcaccactgctagtaaagatgtcgctgatatcggcgtgcgcaccggtaacctgatggcgttgatgttccctgccgtgatgctgatcatgaacctttctgccgttgctgtgatttggtttggtgctttccaggtggaatccggcgagacgcagatcggtacgctctttgcattcttgcagtacatcatgcagatcctcatgggcgtcatgatggcagcgttcatgtttgtcatggttccgcgcgctgccgtttccgctgatcgcatcggtgaggttctggaaaccacaccgtctgtgcaggcgccagaaacaccggcgcagccgtcgacaagcgctggcgaaatcgtgttcaacaacgcgacttttgcctaccccggcgcggatgaccccgtgttaaataatgtgagcttccgcgttgcgcctggtagcacgacggcgatcatcggctcgacgggttcgggtaagacgacgttgatcgggctggttcctaggcttttcgacgtcaccgaaggcgacgttaccgtcgatggcaccgatgttcgtgaatttgagccgctgaagctgtgggatcggatcggtcttgttccgcagaagtcgttcctgttttctggaacgatcgccagcaacctgcgttatggcaatgaagatgccacggaaacgcagctgtggcaggcgcttgcaattgctcaggcggcggactttgtgcgtgagatgccagagggtcttgattctgagattgctcagggtggaaccaatgtttctggtggtcagcgccagcgactagccattgccagggcgttgttgaagcaacctgagatctatattttcgacgattctttctccgccctcgatgtgagcacagacgccgctcttcgccgagcgctgagcaccaacctgccggatgcaaccaagttgattgtcgcccagcgtgtcagcacgattcgagatgccgatcagattgtggtgcttgataacggcgaggttgtcggtattggaacgcacacgaatttgctgaacacgtgcggtacctaccgtgaaattgttgaatcccaagagactgcgcaggcgcaatcatgagtaatactgcaggcccccgc

SEQ ID NO: 148 - protein, 549 aa, Corynebacterium glutamicum
NHLLLLPTVKADIIDNGVVTGDIGYIWHTGGIMLALTLVQVACAIAGVYFGSKLSMRVGRDLRSAIFGKVVNFSEREMGQFGAPSLITRNTNDVQQVQMLVQMTSTLMISAPMLAIGGIIMAVRQDLGLSWLMVVSIPVLIIVVALIIVRMVPLFQTMQKRIDRINQIIREQLTGIRVIRAFVREDVERERFTTASKDVADIGVRTGNLMALMFPAVMLIMNLSAVAVIWFGAFQVESGETQIGTLFAFLQYIMQILMGVMMAAFMFVMVPRAAVSADRIGEVLETTPSVQAPETPAQPSTSAGEIVFNNATFAYPGADDPVLNNVSFRVAPGSTTAIIGSTGSGKTTLIGLVPRLFDVTEGDVTVDGTDVREFEPLKLWDRIGLVPQKSFLFSGTIASNLRYGNEDATETQLWQALAIAQAADFVREMPEGLDSEIAQGGTNVSGGQRQRLAIARALLKQPEIYIFDDSFSALDVSTDAALRRALSTNLPDATKLIVAQRVSTIRDADQIVVLDNGEVVGIGTHTNLLNTCGTYREIVESQETAQAQS

SEQ ID NO: 149 - DNA, 922 bp, Corynebacterium glutamicum
  CDS (101)..(922): FRXA00732
tctttggcaaggtagtgaacttctctgagcgtgagatgggtcaatttggcgcacccgtcgctgatcaccccgaaacaccaacgatgtgcagcaggttcagatgctggtgcagatgacctccactttgatgatttccgccccgatgctggccattggtggcatcatcatggcggtgcgtcaggatcttggtttgtcttggctgatggtggtcagtattccggtgctcatcatcgtggtggcgctgatcattgtgcgcatggttccgttgttccaaaccatgcaaaagcgcattgaccgcatcaatcagattatacgcgagcagctcaccggtatccgcgtgatccgcgcgttcgtgcgtgaagatgtggaacgcgaacgattcaccactgctagtaaagatgtcgctgatatcggcgtgcgcaccggtaacctgatggcgttgatgttccctgccgtgatgctgatcatgaacctttctgccgttgctgtgatttggtttggtgctttccaggtggaatccggcgagacgcagatcggtacgctctttgcattcttgcagtacatcatgcagatcctcatgggcgtcatgatggcagcgttcatgtttgtcatggttccgcgcgctgccgtttccgctgatcgcatcggtgaggttctggaaaccacaccgtctgtgcaggcgccagaaacaccggcgcagccgtcgacaagcgctggcgaaatcgtgttcaacaacgcgacttttgcctaccccggcgcggatgaccccgtgttaaataatgtgagcttccgcgttgcgcctggtagcacgacggcgatcatcggctcgacgggttcgggtaagacgacgttgatcgggctggttcctaggcttttcgacgtcaccgaaggcgacgttaccgtcgatggcaccgatgttcgt

SEQ ID NO: 150 - protein, 274 aa, Corynebacterium glutamicum
MLVQMTSTLMISAPMLAIGGIIMAVRQDLGLSWLMVVSIPVLIIVVALIIVRMVPLFQTMQKRIDRINQIIREQLTGIRVIRAFVREDVERERFTTASKDVADIGVRTGNLMALMFPAVMLIMNLSAVAVIWFGAFQVESGETQIGTLFAFLQYIMQILMGVMMAAFMFVMVPRAAVSADRIGEVLETTPSVQAPETPAQPSTSAGEIVFNNATFAYPGADDPVLNNVSFRVAPGSTTAIIGSTGSGKTTLIGLVPRLFDVTEGDVTVDGTDVR

SEQ ID NO: 151 - DNA, 476 bp, Corynebacterium glutamicum
  CDS (1)..(453): FRXA00734
aggcacctgcgttatggcaatgaagatgccacggaaacgcagctgtggcaggcgcttgcaattgctcaggcggcggactttgtgcgtgagatgccagagggtcttgattctgagattgctcagggtggaaccaatgtttctggtggtcagcgccagcgactagccattgccagggcgttgttgaagcaacctgagatctatattttcgacgattctttctccgccctcgatgtgagcacagacgccgctcttcgccgagcgctgagcaccaacctgccggatgcaaccaagttgattgtcgcccagcgtgtcagcacgattcgagatgccgatcagattgtggtgcttgataacggcgaggttgtcggtattggaacgcacacgaatttgctgaacacgtgcggtacctaccgtgaaattgttgaatcccaagagactgcgcaggcgcaatcatgagtaatactgcaggcccccgc

SEQ ID NO: 152 - protein, 151 aa, Corynebacterium glutamicum
RHLRYGNEDATETQLWQALAIAQAADFVREMPEGLDSEIAQGGTNVSGGQRQRLAIARALLKQPEIYIFDDSFSALDVSTDAALRRALSTNLPDATKLIVAQRVSTIRDADQIVVLDNGEVVGIGTHTNLLNTCGTYREIVESQETAQAQS

SEQ ID NO: 153 - DNA, 1172 bp, Corynebacterium glutamicum
  CDS (1)..(1149): RXN01808
cagagcctcgcgtgtaaagaactcgcatggatgcgcggcggtgcaccagcgcgaacctcaaagcctggattccgccttgaagccgcggaagctttgatcgcagaagtgccagcgccacgcgacaaagtcgagctcatggcattttccaagtccaggcaaggccgcgttgtcattgaacttgaagacgccacagtagccacccctgatgatcgcatcctggtagaagacctcacctggcgtttggctccaggagagcgcatcggtcttgtcggcgtcaacggctccggcaaaaccaccctgctgcgcacccttgccggcgagcagccacttcaggcaggcaaacgcatcgaaggccaaaccgtcaaactgggatggctccgccaggaactcgatgacctagacctcagccgccgactcatcgactgcgttgaagatgtcgcttcctacgtgatgatgggcgacaagcaggtctccgcttcccaattggcagaacgcctcggattctcacccaagaggcaacgcaccccagttggtgacctgtccggtggtgaacgccgccgactccaactcacccgcgtgctcatggccgaaccaaacgtgctgctcctcgacgagcccaccaacgacctggacattgacaccctccaagagctggaatcccttctcgacggatggccaggcaccatggtggttatctcccacgaccgttacctcatcgaacgcgtcaccgactccacctgggcactcttcggcgatggcaagctcaccaacctgccaggcggaattgaagagtacctgcagcgacgagcagcgatggccgcggccgaagacagtggagtgctgaacttgggtgcggccacgcaggctggaaccttttctgctgcaacagagcaggctgccacttctgtggaaagttccggaatttcttcccaagaacgccaccgcatcaccaaggaaatgaacgccctggagcgcaaaatgggcaagcttgaccagcaaatggacaagcttaatcagcagctcgctgatgcagcggaggccatggacaccataaagctcaccgagctggacaccaagctccgcgcagtgcaggaagaacacggcgagctggaaatgcagtggctggaactcggcgaggaaatcgagggctagttcatgccgtcggcaggcga

SEQ ID NO: 154 - protein, 383 aa, Corynebacterium glutamicum
QSLACKELAWMRGGAPARTSKPGFRLEAAEALIAEVPAPRDKVELMAFSKSRQGRVVIELEDATVATPDDRILVEDLTWRLAPGERIGLVGVNGSGKTTLLRTLAGEQPLQAGKRIEGQTVKLGWLRQELDDLDLSRRLIDCVEDVASYVMMGDKQVSASQLAERLGFSPKRQRTPVGDLSGGERRRLQLTRVLMAEPNVLLLDEPTNDLDIDTLQELESLLDGWPGTMVVISHDRYLIERVTDSTWALFGDGKLTNLPGGIEEYLQRRAAMAAAEDSGVLNLGAATQAGTFSAATEQAATSVESSGISSQERHRITKEMNALERKMGKLDQQMDKLNQQLADAAEAMDTIKLTELDTKLRAVQEEHGELEMQWLELGEEIEG

SEQ ID NO: 155 - DNA, 1142 bp, Corynebacterium glutamicum
  CDS (1)..(1119): FRXA01808
atgcgcggcggtgcaccagcgcgaacctcaaagcctggattccgccttgaagccgcggaagctttgatcgcagaagtgccagcgccacgcgacaaagtcgagctcatggcattttccaagtccaggcaaggccgcgttgtcattgaacttgaagacgccacagtagccacccctgatgatcgcatcctggtagaagacctcacctggcgtttggctccaggagagcgcatcggtcttgtcggcgtcaacggctccggcaaaaccaccctgctgcgcacccttgccggcgagcagccacttcaggcaggcaaacgcatcgaaggccaaaccgtcaaactgggatggctccgccaggaactcgatgacctagacctcagccgccgactcatcgactgcgttgaagatgtcgcttcctacgtgatgatgggcgacaagcaggtctccgcttcccaattggcagaacgcctcggattctcacccaagaggcaacgcaccccagttggtgacctgtccggtggtgaacgccgccgactccaactcacccgcgtgctcatggccgaaccaaacgtgctgctcctcgacgagcccaccaacgacctggacattgacaccctccaagagctggaatcccttctcgacggatggccaggcaccatggtggttatctcccacgaccgttacctcatcgaacgcgtcaccgactccacctgggcactcttcggcgatggcaagctcaccaacctgccaggcggaattgaagagtacctgcagcgacgagcagcgatggccgcggccgaagacagtggagtgctgaacttgggtgcggccacgcaggctggaaccttttctgctgcaacagagcaggctgccacttctgtggaaagttccggaatttcttcccaagaacgccaccgcatcaccaaggaaatgaacgccctggagcgcaaaatgggcaagcttgaccagcaaatggacaagcttaatcagcagctcgctgatgcagcggaggccatggacaccataaagctcaccgagctggacaccaagctccgcgcagtgcaggaagaacacggcgagctggaaatgcagtggctggaactcggcgaggaaatcgagggctagttcatgccgtcggcaggcga

SEQ ID NO: 156 - protein, 373 aa, Corynebacterium glutamicum
MRGGAPARTSKPGFRLEAAEALIAEVPAPRDKVELMAFSKSRQGRVVIELEDATVATPDDRILVEDLTWRLAPGERIGLVGVNGSGKTTLLRTLAGEQPLQAGKRIEGQTVKLGWLRQELDDLDLSRRLIDCVEDVASYVMMGDKQVSASQLAERLGFSPKRQRTPVGDLSGGERRRLQLTRVLMAEPNVLLLDEPTNDLDIDTLQELESLLDGWPGTMVVISHDRYLIERVTDSTWALFGDGKLTNLPGGIEEYLQRRAAMAAAEDSGVLNLGAATQAGTFSAATEQAATSVESSGISSQERHRITKEMNALERKMGKLDQQMDKLNQQLADAAEAMDTIKLTELDTKLRAVQEEHGELEMQWLELGEEIEG

SEQ ID NO: 157 - DNA, 349 bp, Corynebacterium glutamicum
  CDS (101)..(349): RXN02975
tcgtcggtgcagtcctcggattgcttaagttgtaggtggctgggggcgtcgaaaagcagctttattgacctggcaacttcaattgatagactgttaggttgtgattgtcaccaatgatttagaggtgcgcgttggcgcacgtacccttctcgatgccccaggtcagctccttcgggtgcagccaggcgaccgtattggtctggttggtagaaatggtgcgggcaaaaccaccaccatgcgaatcctctcgggcgaaaccaagccctacggaggatccgtaaccacatctggtgaaatcggttacctgccccaggactcccgcgaaggcaacatcgaacaaaccgcccgc

SEQ ID NO: 158 - protein, 83 aa, Corynebacterium glutamicum
VIVTNDLEVRVGARTLLDAPGQLLRVQPGDRIGLVGRNGAGKTTTMRILSGETKPYGGSVTTSGEIGYLPQDSREGNIEQTAR

SEQ ID NO: 159 - DNA, 732 bp, Corynebacterium glutamicum
  CDS (101)..(709): RXN03116
aggggaatggcttaatatcgtaggtcccaacggctgcggaaagagtacgttgctgcacgcttttgctcaggtactgtcactggaatcgggaaggctgaaaatgggggagggggacgtcgaaaagcattttgcttttggtcttaaagctgcgaagcagcgtcgctttttcgcgcgtaccgtggccctcatgccacagaatcctactattcctgcaggtctgagcgtttttgattatgtgctgctggggcgtcatccgcacagttacgcgccggggcgtgctgatgatgagatcgtgaagcggtgcctcgctgatctgaaattggagcatttcagcgaccgcggcttagacgaattgtccggcggcgagcgtcaacgcgtcagccttgcccgcgcgctcgcccaagaaccgcgcatcgtgcttctcgacgagccgacctccgcgcttgacatcggccatgcgcaggaaacgcttgagcttatcgacgccatccggcaccgactcggcctcaccgtgatcgcggcgatgcatgacctcaccctgactgcgcaatacggcgatcgggtgctcatgatgaatggtggccgcaaagttttcgagggcactgcagccgaagtgctcaccgcgcagcggatttcggagatttatgatgccactgtgattgttgaggttattgatgggcgtcccgtggtgattccgcaacggtcgcactgacctgttgtggcagaccagac

SEQ ID NO: 160 - protein, 203 aa, Corynebacterium glutamicum
MGEGDVEKHFAFGLKAAKQRRFFARTVALMPQNPTIPAGLSVFDYVLLGRHPHSYAPGRADDEIVKRCLADLKLEHFSDRGLDELSGGERQRVSLARALAQEPRIVLLDEPTSALDIGHAQETLELIDAIRHRLGLTVIAAMHDLTLTAQYGDRVLMMNGGRKVFEGTAAEVLTAQRISEIYDATVIVEVIDGRPVVIPQRSH

SEQ ID NO: 161 - DNA, 390 bp, Corynebacterium glutamicum
  CDS (101)..(367): RXN03108
caaccagcctgccacgttgctggatggaccgtcgtaatcatcggcatcaccggcttaatccttgaccacctcatcggtgagttgcagaaagtagttcgctatgactaaaccaaacgcttccgtcgagctgaatacgatcaccaagtcctacggctccaccactatcattggcgatacgagcatcaccatcaacgacggtgaattcgtctccctcctcgacccttccggctgcggaaaatcaacaattctcaaaatgatcgccggactggcctccccatccaccggcacagtcagcgcaggcaacgaagaaattaaaggaccaggacctgaccgaggcatggttttccaagaccacgccctcctgccctgattgaccgcacgcggcaacat

SEQ ID NO: 162 - protein, 89 aa, Corynebacterium glutamicum
MTKPNASVELNTITKSYGSTTIIGDTSITINDGEFVSLLDPSGCGKSTILKMIAGLASPSTGTVSAGNEEIKGPGPDRGMVFQDHALLP

SEQ ID NO: 163 - DNA, 1347 bp, Corynebacterium glutamicum
  CDS (101)..(1324): RXN03129
gctgaggttgagaccaagctgaacaccatctacacccgcgacatcgaaccacttatttaatccgagcacttcagctacacctatttaaggaggctgtgacatggcgtcaatcgtctttgaaaacgtcacacgcaaatactctccgggcgcacgcccggccgtcgacaagcttaatttggaaatcgccgacggcgagttcctagttctcgttggaccctcaggctgtggaaagtccacttctttgcgcatgctggctggtcttgagcctatcgacgagggacgtctactcattgatggtaaagacgccacggaactgcgtccgcaggatcgtgacatcgctatggtcttccagagctacgcgctgtacccgaatatgactgttcgggacaacatgggctttgcgctgaagaatcagaaggtggctaaggctgagatcgaaaagcgtgttgctgaagcctcacgcattctgcagctggatccgtatcttgatcgtaagcctgcagctttgtctggtggtcagcgccagcgcgtggccatgggccgtgcaattgtgcgtgagccatcggtgttctgcatggatgagccactgtccaacctagatgcgaagctgcgtgtgtctacgcgtgcggagatctctggtttgcagcgtcgcatgggcgtgaccacggtgtatgtgactcacgatcaggtcgaggccatgaccatgggtgatcgcgtcgctgtgcttttgctcggtgtgctgcagcaagtagacaccccgcagaacctgtacgactacccagcaaatgcgttcgtcgccagcttcattggttccccttccatgaacttgattgagggcaccatccgtggcgataaggtcactttgggtactggaattcagatttcagttcctgatgaggtggcagcagaggttcgcaacaacccggatcgctttgagggtcgtccagtcattgttggtgctcgtcccgagcacatgtatttgaccacggcgaatgagagtggtgctgtattgggcgaagtcagccacattgatgagctcggcgcggattcaatggtctacgtattggcgtctggtgtgaagaacccgaatactgatcttttgggtgagggcattccagaggatatgcgcgtgaccgttgtcggtgctgaagagaccgataaggcccggctgggtattcgtgttgagcgccatcacggtctgaaggccggcgataaggtgcacgttgttgctgcaccgaaggatgttcacctcttcgacggtcttgatggccgtcgaatcggtgcatcggttctagctccagcccatacagtccagtctggtcactagattatttaccagtgcaactc

SEQ ID NO: 164 - protein, 408 aa, Corynebacterium glutamicum
MASIVFENVTRKYSPGARPAVDKLNLEIADGEFLVLVGPSGCGKSTSLRMLAGLEPIDEGRLLIDGKDATELRPQDRDIAMVFQSYALYPNMTVRDNMGFALKNQKVAKAEIEKRVAEASRILQLDPYLDRKPAALSGGQRQRVAMGRAIVREPSVFCMDEPLSNLDAKLRVSTRAEISGLQRRMGVTTVYVTHDQVEAMTMGDRVAVLLLGVLQQVDTPQNLYDYPANAFVASFIGSPSMNLIEGTIRGDKVTLGTGIQISVPDEVAAEVRNNPDRFEGRPVIVGARPEHMYLTTANESGAVLGEVSHIDELGADSMVYVLASGVKNPNTDLLGEGIPEDMRVTVVGAEETDKARLGIRVERHHGLKAGDKVHVVAAPKDVHLFDGLDGRRIGASVLAPAHTVQSGH

SEQ ID NO: 165 - DNA, 843 bp, Corynebacterium glutamicum
  CDS (101)..(820): FRXA01890
gctgaggttgagaccaagctgaacaccatctacacccgcgacatcgaaccacttatttaatccgagcacttcagctacacctatttaaggaggctgtgacatggcgtcaatcgtctttgaaaacgtcacacgcaaatactctccgggcgcacgcccggccgtcgacaagcttaatttggaaatcgccgacggcgagttcctagttctcgttggaccctcaggctgtggaaagtccacttctttgcgcatgctggctggtcttgagcctatcgacgagggacgtctactcattgatggtaaagacgccacggaactgcgtccgcaggatcgtgacatcgctatggtcttccagagctacgcgctgtacccgaatatgactgttcgggacaacatgggctttgcgctgaagaatcagaaggtggctaaggctgagatcgaaaagcgtgttgctgaagcctcacgcattctgcagctggatccgtatcttgatcgtaagcctgcagctttgtctggtggtcagcgccagcgcgtggccatgggccgtgcaattgtgcgtgagccatcggtgttctgcatggatgagccactgtccaacctagatgcgaagctgcgtgtgtctacgcgtgcggagatctctggtttgcagcgtcgcatgggcgtgaccacggtgtatgtgactcacgatcaggtcgaggccatgaccatgggtgatcgcgtcgctgtgcttttgctcggtgtgctgcagcaagtagacaccccgcagaacctgtacgactacccagcaaatgcgttcgtcgccagcttcattggttcccttccatgaacttgattgagggcaccatc

SEQ ID NO: 166 - protein, 240 aa, Corynebacterium glutamicum
MASIVFENVTRKYSPGARPAVDKLNLEIADGEFLVLVGPSGCGKSTSLRMLAGLEPIDEGRLLIDGKDATELRPQDRDIAMVFQSYALYPNMTVRDNMGFALKNQKVAKAEIEKRVAEASRILQLDPYLDRKPAALSGGQRQRVAMGRAIVREPSVFCMDEPLSNLDAKLRVSTRAEISGLQRRMGVTTVYVTHDQVEAMTMGDRVAVLLLGVLQQVDTPQNLYDYPANAFVASFIGSLP

SEQ ID NO: 167 - DNA, 1056 bp, Corynebacterium glutamicum
  CDS (101)..(1033): RXN02945
ttccggtgcgatccttgccggcctgctcagctggtacctggtccgcgcgttggcgaggactggtgcacttgatcgtttcgccgctggccgcgaggtataaatgaccaccgcacttggaacgcgcgttgttgcgcgcaactttggctaccgccatgcttcccgggaaaaccccgcgctcaaagacatcaacttcgagatcgcacctggtgaacgcatcctgctcaccggcgcttccggcgccggaaaatccacgctactcgccgcgctcgctggcgttttaggcggttctgatgagggcgtttctacgggcgaattgcttgtcgacgccccctccatcggtttggttctccaagatccagattcccaagtcatcgcctcccgcatcggcgatgatgtggcgtttggctgcgaaaacctccaaattccgcgcgaggaaatctggccacgggtggaacgagcacttgaattggtgggcttggatctaccactgagccaccccacgaaatatctttccggtggccaaaaacaacgcctcgctcttgccggtgtgatcgccatgggtgctcgtctgattctgcttgatgaacccaccgcaaaccttgatcctcaaggccaaaaaaatgtggtcgcagcagtggatcgcgttgttcaggaaactggagcaacactcatcgtggtggaacaccgccatgagctgtgggtcaacatcattgaccggatcatcagtattactgacggcgaagatgtccaacctgcagagttgatcaaggtgggccagttgcctggggcgcagccgtcgacaagcaaaccgatcttgtgggcgaatgatttgctgtgcacctggggcggcctgcgtagttttgaggtgccggaaggcgcctcgacggtgatcaccgggccgaatggcgctggaaaatccacacttgcgctgaccatgggtggattgcttccgcgaaaagtgggcagctggaactctctgacacggtgcgcggcggccttaacacgcccccgcacaagtggcgttcagctgatctagctgcacgtattggcactgtc

SEQ ID NO: 168 - protein, 311 aa, Corynebacterium glutamicum
MTTALGTRVVARNFGYRHASRENPALKDINFEIAPGERILLTGASGAGKSTLLAALAGVLGGSDEGVSTGELLVDAPSIGLVLQDPDSQVIASRIGDDVAFGCENLQIPREEIWPRVERALELVGLDLPLSHPTKYLSGGQKQRLALAGVIAMGARLILLDEPTANLDPQGQKNVVAAVDRVVQETGATLIVVEHRHELWVNIIDRIISITDGEDVQPAELIKVGQLPGAQPSTSKPILWANDLLCTWGGLRSFEVPEGASTVITGPNGAGKSTLALTMGGLLPRKVGSWNSLTRCAAALTRPRTSGVQLI

SEQ ID NO: 169 - DNA, 357 bp, Corynebacterium glutamicum
  CDS (101)..(334): RXA01247
tccgatgaccaccccgacttcccccttgctgccgctggcctccgacggttgtggatgctgcgcgccctctacaccgtccgcgaccgtctccgcctcggccgtggccgcggcaaccgacgcaacacctgaaggtcccaccacctaccaggtcacaggcatgacctgcggacactgcgccgacaacgtcaccgaggcggtgagcgctctgccccaggtcgacgacgtccaggtcgacctcatcgccggtggggtctccatcgtcacggtcacgggttccgtgcccctggaaaccgtccaccgggcaattgaggagaccggctacaccgtcttgtcctgatcgattcacccatcatctcg

SEQ ID NO: 170 - protein, 78 aa, Corynebacterium glutamicum
VAAATDATPEGPTTYQVTGMTCGHCADNVTEAVSALPQVDDVQVDLIAGGVSIVTVTGSVPLETVHRAIEETGYTVLS

SEQ ID NO: 171 - DNA, 1296 bp, Corynebacterium glutamicum
  CDS (101)..(1273): RXN00099
ctctggtgaagaggatgttgactcgggagattcttccactgattcactgattaagtggtaccgcgcaaataggtagtcgcttgcttatagggtcaggggcgtgaagaatcctcgcctcatagcactggccgctatcatcctgacctcgttcaatctgcgaacagctattactgctttagctccgctggtttctgagattcgggatgatttaggggttagtgcttctcttattggtgtgttgggcatgatcccgactgctatgttcgcggatgctgcgtttgcgcttccgtcgttgaagaggaagttcactacttcccaactgttgatgtttgccatgctgttgactgctgccggtcagattattcgtgtcgctggacctgcttcgctgttgatggtcggtactgtgttcgcgatgtttgcgatcggagttaccaatgtgttgcttccgattgctgttagggagtattttccgcgtcacgtcggtggaatgtcgacaacttatctggtgtcgttccagattgttcaggcacttgctccgacgcttgccgtgccgatttctcagtgggctacacatgtggggttgaccggttggagggtgtcgctcggttcgtgggcgctgctggggttggttgcggcgatttcgtggattccgctgttgagtttgcagggtgccagggttgttgcggcgccgtcgaaggtttctcttcctgtgtggaagtcttcggttggtgtggggctcgggttgatgtttgggtttacttcgtttgcgacgtatatcctcatgggttttatgccgcagatggtaggtgatcctcagctcggtgcggtgttgttaggctggtggtcaattttgggattgccgctgaacattctgggaccgtggttggtgacgcgtttcactaactgcttcccgatggttgttatcgccagtgtcatgtttctcatcggtaatggtgggttttgtttggctccggatgttgcgccgtggttgtgggcgacgttgtctggtcttggtccccttgcgttcccgatggcgttgacgctcattaatattcgtgctgaaactagtgctggtgcttctgcgttgagttccttcgggcagggtttgggttatacgattgcgtgtttcggtcccttgttgactggtttcattgtcgatgcgacaggcagcttccgaacaatctttgtgctttttgcggttgcaacactcttcgttattagaggcggttactttgcgacaaggcaggtttacgtcgaaaagcttttaaatcgctaggatggcgctatgccgcaaag

SEQ ID NO: 172 - protein, 391 aa, Corynebacterium glutamicum
VKNPRLIALAAIILTSFNLRTAITALAPLVSEIRDDLGVSASLIGVLGMIPTAMFADAAFALPSLKRKFTTSQLLMFAMLLTAAGQIIRVAGPASLLMVGTVFAMFAIGVTNVLLPIAVREYFPRHVGGMSTTYLVSFQIVQALAPTLAVPISQWATHVGLTGWRVSLGSWALLGLVAAISWIPLLSLQGARVVAAPSKVSLPVWKSSVGVGLGLMFGFTSFATYILMGFMPQMVGDPQLGAVLLGWWSILGLPLNILGPWLVTRFTNCFPMVVIASVMFLIGNGGFCLAPDVAPWLWATLSGLGPLAFPMALTLINIRAETSAGASALSSFGQGLGYTIACFGPLLTGFIVDATGSFRTIFVLFAVATLFVIRGGYFATRQVYVEKLLNR

SEQ ID NO: 173 - DNA, 1296 bp, Corynebacterium glutamicum
  CDS (101)..(1273): FRXA00099
ctctggtgaagaggatgttgactcgggagattcttccactgattcactgattaagtggtaccgcgcaaataggtagtcgcttgcttatagggtcaggggcgtgaagaatcctcgcctcatagcactggccgctatcatcctgacctcgttcaatctgcgaacagctattactgctttagctccgctggtttctgagattcgggatgatttaggggttagtgcttctcttattggtgtgttgggcatgatcccgactgctatgttcgcggatgctgcgtttgcgcttccgtcgttgaagaggaagttcactacttcccaactgttgatgtttgccatgctgttgactgctgccggtcagattattcgtgtcgctggacctgcttcgctgttgatggtcggtactgtgttcgcgatgtttgcgatcggagttaccaatgtgttgcttccgattgctgttagggagtattttccgcgtcacgtcggtggaatgtcgacaacttatctggtgtcgttccagattgttcaggcacttgctccgacgcttgccgtgccgatttctcagtgggctacacatgtggggttgaccggttggagggtgtcgctcggttcgtgggcgctgctggggttggttgcggcgatttcgtggattccgctgttgagtttgcagggtgccagggttgttgcggcgccgtcgaaggtttctcttcctgtgtggaagtcttcggttggtgtggggctcgggttgatgtttgggtttacttcgtttgcgacgtatatcctcatgggttttatgccgcagatggtaggtgatcctcagctcggtgcggtgttgttaggctggtggtcaattttgggattgccgctgaacattctgggaccgtggttggtgacgcgtttcactaactgcttcccgatggttgttatcgccagtgtcatgtttctcatcggtaatggtgggttttgtttggctccggatgttgcgccgtggttgtgggcgacgttgtctggtcttggtccccttgcgttcccgatggcgttgacgctcattaatattcgtgctgaaactagtgctggtgcttctgcgttgagttccttcgggcagggtttgggttatacgattgcgtgtttcggtcccttgttgactggtttcattgtcgatgcaacaggcagcttccgaacaatctttttgctttttgcgggtgcaacactcttcgttattagaggcggttactttgcgacaaggcaggtttacgtcgaaaagcttttaaatcgctaggatggcgctatgccgcaaag

SEQ ID NO: 174 - protein, 391 aa, Corynebacterium glutamicum
VKNPRLIALAAIILTSFNLRTAITALAPLVSEIRDDLGVSASLIGVLGMIPTAMFADAAFALPSLKRKFTTSQLLMFAMLLTAAGQIIRVAGPASLLMVGTVFAMFAIGVTNVLLPIAVREYFPRHVGGMSTTYLVSFQIVQALAPTLAVPISQWATHVGLTGWRVSLGSWALLGLVAAISWIPLLSLQGARVVAAPSKVSLPVWKSSVGVGLGLMFGFTSFATYILMGFMPQMVGDPQLGAVLLGWWSILGLPLNILGPWLVTRFTNCFPMVVIASVMFLIGNGGFCLAPDVAPWLWATLSGLGPLAFPMALTLINIRAETSAGASALSSFGQGLGYTIACFGPLLTGFIVDATGSFRTIFLLFAGATLFVIRGGYFATRQVYVEKLLNR

SEQ ID NO: 175 - DNA, 1506 bp, Corynebacterium glutamicum
  CDS (101)..(1483): RXA00634
aagtgtttttaattaccgcagctttgtcttaggagaagtcatggtccaactggatcaacgggttaggttcaaaagcgcaacctcaataatcagtattgaaatgtgggagcgattcagcttctacggcatgcaagcactcttggtgtactacctgtattttgatgttgcagccggtggattaggccttgatcaaacccaagcaacaggactggtcggcgtttatggcgcactgctctacctctgctgttgggcaggcggttgggtcagtgacagagtcctgggcgcagaaaaaaccctgctgggcggtgcgatctcagtaaccatcggacaccttgtgcttgctggcctcggcgggaaaattggtctagccattggccttggatgcatcgcgatcggttcaggatttgtgaaaacagcagccatcaccgtgctgggatccaggcatggtgaacaagaaggagacgcaaaggcagatcccgcattccaactcttctacctaggcatcaacgttggtgcactgctcggaccactcctgaccggttggctctccagcaggtattcctttgaaatgggattcggcgcagccgcagtccttatgatcggcggattgggaatctacgcagcgttgcggaaaccaatgctgcaatcgttcccgctcgaggtgaagaaagcgctgctccgcgcccaaaaccctgcagaaaaacatgtgattagcacggcatttgctgcagtggctgtgctttgcggagtgctgctttatcttctccttacagaaacagtcagcgcagaccaactagctggagctctgcttttagtaacaatcggtgcagcactatggctcattatccagcccttacgacacccacaagtcagctccgaagagaaacgaaaagtgctggcattcatcccgatcttcgtctgctcaaccgcattctgggcagtgcaagcacaaacctacggcgtactagctgtgtactcccaagaacgtgttgaccgcatggttggcgattttgagatcccagcagcctggtcacaatcactcaatccttttttcatcctggcgctgtccatcccgatttccctgtggtttatgcgcggatcacgcgccccaagagtgaaaattggaatcagcattggagtgatcattgcgggaagtgggcttctagttcttattccatttgttggaatgccgctcgcgccagtgtgggtgctgcctttaagtgttttcctcatctcactgggagaacttttcatcggacccggaggaatggctgcgactgcgcaccacgcaccacgaatatttgccacacgattctccgccctgtatttcctcacactcgccatcggcatgtctattgcaggtaatgtgtccaaattttacgaccccaccaaccacacctccgagctccgatacttcgcggtatttggcatttcgatcatcgtcatcggtgtcggttcactgatggtggccaagaaggttggataacagggttaatcttgggtgat

SEQ ID NO: 176 - protein, 461 aa, Corynebacterium glutamicum
MWERFSFYGMQALLVYYLYFDVAAGGLGLDQTQATGLVGVYGALLYLCCWAGGWVSDRVLGAEKTLLGGAISVTIGHLVLAGLGGKIGLAIGLGCIAIGSGFVKTAAITVLGSRHGEQEGDAKADPAFQLFYLGINVGALLGPLLTGWLSSRYSFEMGFGAAAVLMIGGLGIYAALRKPMLQSFPLEVKKALLRAQNPAEKHVISTAFAAVAVLCGVLLYLLLTETVSADQLAGALLLVTIGAALWLIIQPLRHPQVSSEEKRKVLAFIPIFVCSTAFWAVQAQTYGVLAVYSQERVDRMVGDFEIPAAWSQSLNPFFILALSIPISLWFMRGSRAPRVKIGISIGVIIAGSGLLVLIPFVGMPLAPVWVLPLSVFLISLGELFIGPGGMAATAHHAPRIFATRFSALYFLTLAIGMSIAGNVSKFYDPTNHTSELRYFAVFGISIIVIGVGSLMVAKKVG

SEQ ID NO: 177 - DNA, 1647 bp, Corynebacterium glutamicum
  CDS (101)..(1624): RXA02451
gatcaacttaagcctctagctattttcaactgtgtttcagttgcgggatcgttgggtgcctaattggagttgtgcttttaggtggaggatcatagaggttatgaacaccgacacaactcaagacggtgtgagtcctgaaccttccgacccccacctagggtctgaagtggcggaaactcaccgcgaaaagaaattcttcggccagccttgggggctggcaaatctcttcggcgtggagatgtgggagcgattcagcttctacggcatgcagtccatccttgctttctatctgtactactccgtcaccgatggcggacttggtatgaatcagacagctgcactgtccattgtgggcgcctacggcggcttcgtctacatgacctccctcgtggcttcgttcattgcagaccgagtattgggctctgaacgtacactcttctactccgcgatcatcgtcatgctgggccacattgccctggccttgattccgggatatacgggactgtccatcggcttggtcctcatcggccttggctcaggtggcgtgaagacggcagcgcaggttgtgctgggccagctgtactcacgcacggacacgcgtcgagacgcaggcttctccatcttctacatgggcgtcaacctcggtggcctctttggcccgctgatcaccaacgctctgtggggatggggaggattccactggggcttcggtatcgccgcagtcggcatggctttgggtctcatccaatacgtggcgatgcgtaaaaccaccatcggtgcggcaggccatactgttcctaacccactgcctaagaatgaatatgcgcgctggattatcggtgcagtcgtggttgtcgcagcagttgtcgctctcatcgcaacgggcatcatcaagctggaatggctgtccaacatcaccgcagcgatcgcactgattgcggctattgctctgcttgctcagatgtacgtttccccactgaccaccgcagcggaaaagtcccgcttgttgggattcatcccgatgttcatcggtggcgtgcttttcttcgcgatcttccaaacccagttcacggtcctcgcggtttactccgacacccgcctggaccgtaacttcttcggcattgatcttcctccaggattgatcaactccttcaacccaatcttcatcatcatcttctccggaatctttgccaccttgtggacaaaactcggagcaaagcagtggtctactgcagtgaagttcggtgtcgccaacattgtcattggttgcgcgctgttcttcttcctgccgttcgccggcggtgcagagaactctaccccaatggcactgatcatttgggtctacttcctcttcaccatcgctgagcttctgctctcccctgtcggcaactcacttgcaaccaaggtcgcacccgaggcattccagtcccgcatgttcgccgtgtggctgatggctgtctccatgggtacgtccctgtccggcaccctgggtggttactacgatccaaccgatgcaggatctgaaaaggtcttcttcattaccgttggcgttgcagccatcgttcttggtgcaatcgtcatagcagccaagggctgggtgctgaagaagttcatcgacgtccgataggcctcacaaagcctcaaaac

SEQ ID NO: 178 - protein, 508 aa, Corynebacterium glutamicum
MNTDTTQDGVSPEPSDPHLGSEVAETHREKKFFGQPWGLANLFGVEMWERFSFYGMQSILAFYLYYSVTDGGLGMNQTAALSIVGAYGGFVYMTSLVASFIADRVLGSERTLFYSAIIVMLGHIALALIPGYTGLSIGLVLIGLGSGGVKTAAQVVLGQLYSRTDTRRDAGFSIFYMGVNLGGLFGPLITNALWGWGGFHWGFGIAAVGMALGLIQYVAMRKTTIGAAGHTVPNPLPKNEYARWIIGAVVVVAAVVALIATGIIKLEWLSNITAAIALIAAIALLAQMYVSPLTTAAEKSRLLGFIPMFIGGVLFFAIFQTQFTVLAVYSDTRLDRNFFGIDLPPGLINSFNPIFIIIFSGIFATLWTKLGAKQWSTAVKFGVANIVIGCALFFFLPFAGGAENSTPMALIIWVYFLFTIAELLLSPVGNSLATKVAPEAFQSRMFAVWLMAVSMGTSLSGTLGGYYDPTDAGSEKVFFITVGVAAIVLGAIVIAAKGWVLKKFIDVR

SEQ ID NO: 179 - DNA, 1426 bp, Corynebacterium glutamicum
  CDS (93)..(1403): RXA02394
tgttgatgaatcagaagaacctcgagatttggacgagctagaggcccaaagcgctatagattctgcaagttcagcggaaggtaggaactaatatgttgtcgccagcagctgtagcagctttaattcttgtcatcggcattgtggtgctcatcatcgcatcagtgcccgttgccattgccatcggtttgccatcactttttgccgcgatggccgtgcttggcccagaaaacgccgcgcaggccgtcgcgcagcgcatgtttaccggcacaaactcctttacactccttgccattccgttcttcgtgttggcgggtttgctgatgaactcgggtggtattgccacgcggcttatcgacgccgcgaaggtgcttgtcggccgcatgcctgcctccatggccaatacgaatatcgcagcaaatggtctcttcggagcagtttcaggggcagcggtagcatcagcttctgccgtgggaaccgtcatgacaccaaaaatgaaggaagagggctactcgcgcgcttacgcagcggccgtcaacgtggcttcagcacctgcgggcatgctgatcccgccatcaaacacttttattgtgtattccttggtgtcctcgacatcaattgcagcactatttatggccggtgttggacccggtctgctctggattctggcctgtgtcatcgtgggaacttggttagcgcgaaaggaaaactacaagcgcgagcagattcatccaacattcaagcagtcgctcgttgtgctgtggagggcgctgccttcactgctcatgatcgtcattgttgttggaggtatcttgctgggctggttcactccaactgaatccgctgctattgctgtagtgtactgcctggtcttgggctttatttaccgcacaatcaaggtgggagatctggcagatattttgctcaaggcaactcgcaccacatcaattgtcatgttgctcattgcagtttctgcagcactgtcgtgggtgatggcctttgccaagatccctcagatgatctctgatgcgcttctttcggtatccgattccaaggttgtcatcttgttgatcatgatgttcatcctgttactcatcggtaccgtaatggacccaacaccagcaattttgatcttcgtcccgatcttccttccagtggttaccgaacttggtgtggacccagtccacttcggtgcgatggtggtaatgaacctgtccgtgggcgtgattaccccaccagtaggcaacgtgttgttcgttggttcgcaagtggcagggctgcgtgtggaaactgtgatcagacgactgtggccgtatctcattgccattattgttgcgctgttcgtggttgttttcgtaccgcagatctctatctggctgcccacaacaatgggattgatgggaggctaaacctccagccatcagctaag

SEQ ID NO: 180 - protein, 437 aa, Corynebacterium glutamicum
MLSPAAVAALILVIGIVVLIIASVPVAIAIGLPSLFAAMAVLGPENAAQAVAQRMFTGTNSFTLLAIPFFVLAGLLMNSGGIATRLIDAAKVLVGRMPASMANTNIAANGLFGAVSGAAVASASAVGTVMTPKMKEEGYSRAYAAAVNVASAPAGMLIPPSNTFIVYSLVSSTSIAALFMAGVGPGLLWILACVIVGTWLARKENYKREQIHPTFKQSLVVLWRALPSLLMIVIVVGGILLGWFTPTESAAIAVVYCLVLGFIYRTIKVGDLADILLKATRTTSIVMLLIAVSAALSWVMAFAKIPQMISDALLSVSDSKVVILLIMMFILLLIGTVMDPTPAILIFVPIFLPVVTELGVDPVHFGAMVVMNLSVGVITPPVGNVLFVGSQVAGLRVETVIRRLWPYLIAIIVALFVVVFVPQISIWLPTTMGLMGG

SEQ ID NO: 181 - DNA, 1764 bp, Corynebacterium glutamicum
  CDS (101)..(1741): RXA01012
gacctcatggtggctgactgtgctgcctggttttgtcatcatcgccgtggttatgtctgccaactacctaagccgcatcattcagaaggaggcatagaaaatgactactcccttgttagagatcaacgatctggttgtctcctatcaaactgctaaaggtttggtgcatgctgtcaacaatgtcagcctggaggtgcaccctggccaaatcaccgcgattgttggtgagtccggttctggtaagtccaccaccgctcaggccgtgattggtttgctggctgataatgctgaagtggattctggtcggatttctttcaacggccgttcccttgttggcttgaacgcacgtgagtggaaaaacgttcgcggtaccaaaattggtttgattccgcaggaccccaacaactctctgaacccggtgaaaactatcggcgcttcagtgggggagggcttggctatccacaagcgtggaaccgccgccgagcgcaaaaagaaggtcattgagcttctagagcgcgtgggtattgataacccagaggtccgctatgaccagtacccgcatgagctgtctggtggcatgaagcagcgcgcgttgattgccgctgccattgcacttgaaccagagctgatcattgccgatgagcccacatctgcgctggatgtgaccgtgcagaaaattattctcgatctgctggaagacatgcagcgtgaattgggcatgggtattttgttcattactcacgatctagccgtggcaggcgatcgggcggatcgcatcgtcgtcatgcaaaaaggcgaggtgcgcgaaagtggttacgcggcttcggtcttgaccgacccccagcatgagtattccaagaagttgcttgccgacgcgccctccctcaccatcggcgagatccccacgcgagttccggccgtagatccggaggtagcgcaggccaaaggcccgcttctggtagtggataaattccgcaaggaacaccaacgaggcaaagaaggagcatttgttgccgcaaatgatatttccttcgaagtactgcctggcaccacgcatgccatcgtcggtgaatccggttctggtaaaaccacgcttggccgcgcgatcgcgatgtttaatacgccgacctctggttccatttcagtaagtggcaaggacatcaccaacctgtccaaggcccagcagcgggaactgcgccagcaaatccagctggtgtaccaaaacccgtattcttccctggatcctcgccaaaccattggctccaccatcgcggaacctctgcgcaatttcaccaaggtgagcaagcaggaagccgacgaaaaggtggcacactacctggaactggtggcgcttgacccggctcttgccacccgtcgcccacgtgagctctctggtggtcagcgccagcgcgtcgccattgctcgtgccatgattttggaacctgaattggtggttttcgacgaagccgtatccgcgttggatgtgactgtgcaggcacaaatcctgcgcctgctcgacgatctgcaacgagagctaggcttgacttacgtgtttatttcccacgacctggctgtggtccgtgaaatctctgacactgtgtctgtgatgagtcgcggcaaccaggtggaacttggaaaaaccgcagaagtatttaacaacccgcaaaccgatttcactcgccgactcatcgacgcgatcccaggatcgcgctatcgtggtggcgaactcaatcttggactataggagcagatcttaaaaatgtc

SEQ ID NO: 182 - protein, 547 aa, Corynebacterium glutamicum
MTTPLLEINDLVVSYQTAKGLVHAVNNVSLEVHPGQITAIVGESGSGKSTTAQAVIGLLADNAEVDSGRISFNGRSLVGLNAREWKNVRGTKIGLIPQDPNNSLNPVKTIGASVGEGLAIHKRGTAAERKKKVIELLERVGIDNPEVRYDQYPHELSGGMKQRALIAAAIALEPELIIADEPTSALDVTVQKIILDLLEDMQRELGMGILFITHDLAVAGDRADRIVVMQKGEVRESGYAASVLTDPQHEYSKKLLADAPSLTIGEIPTRVPAVDPEVAQAKGPLLVVDKFRKEHQRGKEGAFVAANDISFEVLPGTTHAIVGESGSGKTTLGRAIAMFNTPTSGSISVSGKDITNLSKAQQRELRQQIQLVYQNPYSSLDPRQTIGSTIAEPLRNFTKVSKQEADEKVAHYLELVALDPALATRRPRELSGGQRQRVAIARAMILEPELVVFDEAVSALDVTVQAQILRLLDDLQRELGLTYVFISHDLAVVREISDTVSVMSRGNQVELGKTAEVFNNPQTDFTRRLIDAIPGSRYRGGELNLGL

SEQ ID NO: 183 - DNA, 762 bp, Corynebacterium glutamicum
  CDS (101)..(739): RXA02660
catttttcagcacactttttaagatctcatcgaaagcgcgatacccactatgtccaatcttttgagacttgtcggccgacggctcatcgctttaccgatcatgattattggcgtcaccctgctggttttcatcgtcatgtcattctctcctgccgacccggcacgacttgccctaggcgaatcagcctcccccgaagcacttgaagcctaccgtgaagccaacggcctcaacgatccaatgatggttcgctatttcgacttcatcctcggcatgctcaaaggcgacttgggaacctctagcggtggcgtagctgttaccgacattgttgcccgcgctttccccatcaccctgcagctaacattctggggactcatcatcgctgttgtagtggcgttgatcctcggtgtcatcgccgctctataccgagaccgctggcctgaccagttgattcgcgtggtctccattgcggctcttgctactccttcattctggttggctatcttgctgatccagtggttgggtactatccctggagcctggggtttcttcccagcacttgtcacccggtgggtcccattcagcgaagatcccgccacctacttcaacaacatcgcacttcagcgattgcgttggcagtccccgttgcaggttctttggcccgcgttgttcgtacctccatggtggaagaactggacaaggactacgtccgcacagcaatcggtgcaggatccccaaaactgaagttgttgcccgcaatgttc

SEQ ID NO: 184 - protein, 213 aa, Corynebacterium glutamicum
MIIGVTLLVFIVMSFSPADPARLALGESASPEALEAYREANGLNDPMMVRYFDFILGMLKGDLGTSSGGVAVTDIVARAFPITLQLTFWGLIIAVVVALILGVIAALYRDRWPDQLIRVVSIAALATPSFWLAILLIQWLGTIPGAWGFFPALVTRWVPFSEDPATYFNNIALQRLRWQSPLQVLWPALFVPPWWKNWTRTTSAQQSVQDPQN

SEQ ID NO: 185 - DNA, 342 bp, Corynebacterium glutamicum
  CDS (101)..(319): RXA02661
tggacaaggactacgtccgcacagcaatcggtgcaggatccccaaaactgaagttgttgcccgcaatgttctgcgcaatgcgctgatcaccccaatcaccgtgattggtcttcgcgttggttccctcatgggtggtgcggtgatcattgagatcatcttcaacatccaagcaatgggacagctcatcctagacggtgtgacccgaaatgacgtctacctcgtccaaggtgtcaccctcaccgttgccatcgccttcatcatcgtcaatatcgccgtggacctgctctacgtcctggtcaatccacgtattaggagcatctagatgcgccgtaaactaaccac

SEQ ID NO: 186 - protein, 73 aa, Corynebacterium glutamicum
VIGLRVGSLMGGAVIIEIIFNIQAMGQLILDGVTRNDVYLVQGVTLTVAIAFIIVNIAVDLLYVLVNPRIRSI

SEQ ID NO: 187 - DNA, 1089 bp, Corynebacterium glutamicum
  CDS (101)..(1066): RXA02034
tcgtggtgatgtcaccagagatcaccggcattgatcccaacgtggtgtccggggcgttggaattgtcgttgattggtcggaaagaatccggggtagcgcagtgagtaaaacaatcgcttggactgtgctgcggtacaccctgacttttgtgatcgccagcatcatcatttttgtgctgattcgagtcatccccggtgaccccgccgctgttgccctgggaattaccgcgacaccagaagcaatcgctgcgttgcaatcacaattaggtactgatcaaccgcttttccaacagtacttttcctggataggtggaatgctcactggcgatttcggcacctcgctgagctctggccaagacctttcccccatcatttttgaccgcttacaagtgagcctcattttggtgggatgctccattgtgttgtcgttgctcattgccattccacttggtgtgctttcggcccggcgcggtggcgtgatcatttccggcatcagccagattggcattgcgatccctagtttcctcgccggtattttgttggtcgctgtcttcgccgttggtttggggtggctgcccgccaatggctggattccgccgtcggaaaactttggaggtttcttagccaggctgatcctcccggttctggctcttactgctgttcaagcagcaattttgacccgctatgtccgctctgcagtaatggatgtaatggggcaagatttcatgcgcaccgcgaggtcgaaaggtatgagcttcaaccgcgcgttgatcatccacggtcttcggaatgctgctcttcctgtccttaccgtcactggtttgcagctaacaaccttggttatcggcgccgtggtgattgaacaagtctttgtcatccccggaatcggttcgatgctgctggagtccgtgtccaaccgtgatctcatcgctgtgcaatctattgtcatgctgctggtggcgttcacgttgctggttaatttggtggttgatctgctgtatcaggtggttgatccaagagtcggtgctgttggggttgctagcactaaggttccagggagcgtggcttaagtgacaacgatcaaaaacat

SEQ ID NO: 188 - protein, 322 aa, Corynebacterium glutamicum
VSKTIAWTVLRYTLTFVIASIIIFVLIRVIPGDPAAVALGITATPEAIAALQSQLGTDQPLFQQYFSWIGGMLTGDFGTSLSSGQDLSPIIFDRLQVSLILVGCSIVLSLLIAIPLGVLSARRGGVIISGISQIGIAIPSFLAGILLVAVFAVGLGWLPANGWIPPSENFGGFLARLILPVLALTAVQAAILTRYVRSAVMDVMGQDFMRTARSKGMSFNRALIIHGLRNAALPVLTVTGLQLTTLVIGAVVIEQVFVIPGIGSMLLESVSNRDLIAVQSIVMLLVAFTLLVNLVVDLLYQVVDPRVGAVGVASTKVPGSVA

SEQ ID NO: 189 - DNA, 818 bp, Corynebacterium glutamicum
  CDS (1)..(795): RXA01013
ttgggcaatccttggacgaggcctgctgctgttatttccatcgtggtactcgccgttgcggtgctgatggcacttgttcctggactgtttacctcccaggatccgttcactggcgatgatgtggcgctgcttgggccaagtggcacccactggtttggtaccgattccgtgggacgcgatctctacagtcgtgttgtttacggcgcgagggaaaccctgctcggtgcactgatcgcagtgctggttggtctgatcgtgggaaccctgatcggactgctcgcaggtgcacagcgcggttgggttgacactgtattaatgcgtttcgtggatgtgctgttgtccatcccggcactgctgctcagcttgactgtcattatccttttgggattcggcaccatgaacgcagcgatcgcagtcggtattacctctgttgccaccttcgcgcgtctggcgcgttcccaggtgatgactgttgcaggttccgatttcgtggaagctgcatacggttccggtggcacccaggcgcaggtgttgttccgccacattctgcctaactctctgaccccagtgtttgctcttgcagcactgcagttcggttccgcgattttgcagctgtccgtgttgggcttcttgggctacggcgctccggcaccaacaccagagtggggtctgctgatctctgatgcccgcgactacatggcgacctcatggtggctgactgtgctgcctggttttgtcatcatcgccgtggttatgtctgccaactacctaagccgcatcattcagaaggaggcatagaaaatgactactcccttgtt

SEQ ID NO: 190 - protein, 265 aa, Corynebacterium glutamicum
LGNPWTRPAAVISIVVLAVAVLMALVPGLFTSQDPFTGDDVALLGPSGTHWFGTDSVGRDLYSRVVYGARETLLGALIAVLVGLIVGTLIGLLAGAQRGWVDTVLMRFVDVLLSIPALLLSLTVIILLGFGTMNAAIAVGITSVATFARLARSQVMTVAGSDFVEAAYGSGGTQAQVLFRHILPNSLTPVFALAALQFGSAILQLSVLGFLGYGAPAPTPEWGLLISDARDYMATSWWLTVLPGFVIIAVVMSANYLSRIIQKEA

SEQ ID NO: 191 - DNA, 933 bp, Corynebacterium glutamicum
  CDS (101)..(910): RXN02933
tgatctgctgtatcaggtggttgatccaagagtcggtgctgttggggttgctagcactaaggttccagggagcgtggcttaagtgacaacgatcaaaaacatgcccctttcagggaaaatcggcggcttcatcgttgccgttgtatttgttcttgctgcgctgtctttcatttggactccgtttgatccagttcaagctttcccacaggagcgccttgagggaagttctttgaggcacctgttgggaacggatcgttatggtcgcgatgttttatcccagatcatggttggttcccgcgtcacgttgttggtgggcatcattgcggtggcgatcgcagcattaatcggcacgccactgggtattgctgcgggaatgcgccgtggcatggtggaaacctttgtcatgcgtggtgccgatttaatgttggcgttcccagcactgttgttggcgattatttccggcgccgttttcggcgcctccacgtggtccgcgatggtcgcgatcggcatcgcaggcatccctagttttgcccgcgtggctcgtgcaggcacattgcaggtgaccagtcaggatttcatcgcagctgctcggctatcaaaagtaagttccgcccggatcgcgcttcgccatattttgcccaacatcaccagcatgttgatcgttcaggcatcagtagcttttgccctggcgatcctggcggaagccgcattgagtttcctcggtttgggcaccactcccccggatcccagctggggtcgcatgttgcaaaccgctcaagcatccatcggcgtcacccccatgttggcggtgtggcccggtgctgcgatcgctttgacggtccttggttttaatcttttcggtgatggtttacgcgatgccatcgatccaaagcgggaggtcggccgtgcttaaagtttctgatttaacggttg

SEQ ID NO: 192 - protein, 270 aa, Corynebacterium glutamicum
MPLSGKIGGFIVAVVFVLAALSFIWTPFDPVQAFPQERLEGSSLRHLLGTDRYGRDVLSQIMVGSRVTLLVGIIAVAIAALIGTPLGIAAGMRRGMVETFVMRGADLMLAFPALLLAIISGAVFGASTWSAMVAIGIAGIPSFARVARAGTLQVTSQDFIAAARLSKVSSARIALRHILPNITSMLIVQASVAFALAILAEAALSFLGLGTTPPDPSWGRMLQTAQASIGVTPMLAVWPGAAIALTVLGFNLFGDGLRDAIDPKREVGRA

SEQ ID NO: 193 - DNA, 900 bp, Corynebacterium glutamicum
  CDS (101)..(889): FRXA02033
tgatctgctgtatcaggtggttgatccaagagtcggtgctgttggggttgctagcactaaggttccagggagcgtggcttaagtgacaacgatcaaaaacatgcccctttcagggaaaatcggcggcttcatcgttgccgttgtatttgttcttgctgcgctgtctttcatttggactccgtttgatccagttcaagctttcccacaggagcgccttgagggaagttctttgaggcacctgttgggaacggatcgttatggtcgcgatgttttatcccagatcatggttggttcccgcgtcacgttgttggtgggcatcattgcggtggcgatcgcagcattaatcggcacgccactgggtattgctgcgggaatgcgccgtggcatggtggaaacctttgtcatgcgtggtgccgatttaatgttggcgttcccagcactgttgttggcgattatttccggcgccgttttcggcgcctccacgtggtccgcgatggtcgcgatcggcatcgcaggcatccctagttttgcccgcgtggctcgtgcaggcacattgcaggtgaccagtcaggatttcatcgcagctgctcggctatcaaaagtaagttccgcccggatcgcgcttcgccatattttgcccaacatcaccagcatgttgatcgttcaggcatcagtagcttttgccctggcgatcctggcggaagccgcattgagtttcctcggtttgggcaccactcccccggatcccagctggggtcgcatgttgcaaaccgctcaagcatccatcggcgtcacccccatgttggcggtgtggcccggtgctgcgatcgctttgacggtccttggttttaatcttttcggtgatggtttacgcgatgccatcgatccatagtattatat

SEQ ID NO: 194 - protein, 263 aa, Corynebacterium glutamicum
MPLSGKIGGFIVAVVFVLAALSFIWTPFDPVQAFPQERLEGSSLRHLLGTDRYGRDVLSQIMVGSRVTLLVGIIAVAIAALIGTPLGIAAGMRRGMVETFVMRGADLMLAFPALLLAIISGAVFGASTWSAMVAIGIAGIPSFARVARAGTLQVTSQDFIAAARLSKVSSARIALRHILPNITSMLIVQASVAFALAILAEAALSFLGLGTTPPDPSWGRMLQTAQASIGVTPMLAVWPGAAIALTVLGFNLFGDGLRDAIDP

SEQ ID NO: 195 - DNA, 958 bp, Corynebacterium glutamicum
  CDS (101)..(958): RXA01006
gccttacgtgaagggctttagccccgaagtgatcggccgccccagcttctatgagacctacattgaccattccagcgaccattccagtgaggaggactaaatgactacctcgcagattctgcgccgcatcggccaagccgtcttggtcttgttggtcacctttaccttggcgttcatcatgctttccgccctccctggcgatgctgtgtccgcccgctattccagccctgatttgggtctgtcacctgagcagatcgcacagatccgtgaatcctatggtgccgatgaatccctgatcgctcagtacttctccaccttgggtggcttccttgtaggtaacttcggttactccgtacaaaccggaactgccgtggcaacccagctggcagaagccctaccaggcaccttgaccttggctattttggcattcttgctcgcagccattttggcactggttatttccattcttgccaccatggatcgctttgcatggatcaagggcatcttccaggctctgcctccattctttgtgtcccttccaagtttctggttgggcatcatcttgatccagatcgtgtccttccgccttggttgggtccccgttattgggaccaccccggcacaaggactgatcctgccgaccatcaccttgtccatcccaattaccgctccgcttgcacaggtgctcatccgctcgattgaagaggtcaaggcacaaccgttcatcgcggctgttcgtgctcgcggtgcgggtgaaatgtggatcttcttccgcaacatcattcgcaacgcccttttgccaaccctgacgattgccggcatcttgtttggtgaactagtcggtggggccgtggtcaccgaggcagtgttcggccgcgctggacttggccaaatgaccgtcaacgcagtggccaaccgcgatatgccagtgatgcttgccatcgtggtgatcgcagct

SEQ ID NO: 196 - protein, 286 aa, Corynebacterium glutamicum
MTTSQILRRIGQAVLVLLVTFTLAFIMLSALPGDAVSARYSSPDLGLSPEQIAQIRESYGADESLIAQYFSTLGGFLVGNFGYSVQTGTAVATQLAEALPGTLTLAILAFLLAAILALVISILATMDRFAWIKGIFQALPPFFVSLPSFWLGIILIQIVSFRLGWVPVIGTTPAQGLILPTITLSIPITAPLAQVLIRSIEEVKAQPFIAAVRARGAGEMWIFFRNIIRNALLPTLTIAGILFGELVGGAVVTEAVFGRAGLGQMTVNAVANRDMPVMLAIVVIAA

SEQ ID NO: 197 - DNA, 1482 bp, Corynebacterium glutamicum
  CDS (101)..(1459): RXA02312
ttagcgcccattaacgcttcacatccttatattcccaaggagcacgaccatttctgattcagcagtccaggagaatcacgaaccgcacctcaagcgcggtttgagcaatagacaccttcagctcatcgccatcggcggagcgatcggtacgggtctgttcatggggtccggcaagacgatctccgttgcggggccatcagtaattttggtgtacgccattattggtttcatgcttttcttcgtcatgcgtgccatgggagagctgctgctcgccaatttgaattacaaatctttgcgcgatgcggtctctgatattttgggtcctggcgcaggttttgtcaccggctggacatattggttctgctggattgccacaggcatggcggacatcgtggcgatcactggatacacccaatactggtggcctgagatcccattgtggcttccaggtgtgctcaccattgcgttgctgtttgccctgaacttggctgcggtacgactgttcggtgagatggagttttggttcgccatcatcaaaatcgtggctatcgtgtccttgatcgtcgtgggacttttcatggtggtcacagcctttgaatcacctaatggcaccaccgcgcagttcaacaacctcattgagcatggcggatttttccccaacggcatcaccggtttcttggctggtttccagatcgctatctttgcgttcgtcgggattgaacttgccggcactgcagctgcagagactgagaatcccaccaagacgcttcctcgggcaatcaactccattcccatccgcatcgtggtgttctatgttttggcgttggctgtcatcatgatggtcaccccatgggatcaggtccgtgctgacaacagcccattcgtgcagatgttcgcgctggcaggaatcccagcggcggcaggcatcattaactttgtggtcatcacttctgcagcgtcgtctgccaacagtggtattttctccacctcccgcatgttgtatggattgtctttggaaggcgcagctccgaaacggtggagccggttgtccaagaacttggtgccagccaggggattgactttttctgtgatttgcctcattccagcggtgggtttgctgtacgctggcggcactgtcatcgaggcattcacactgatcaccacggtttcttcggtgttgttcatggtggtgtggtcctacattttggtggcttatatcgtctaccgccgcaacagcccggaattacacaaaaagtcgattttcaaaatgcctggcggcgtggtcatggcagttgtggtgttggtgttcttcgcagcgatgttggtggtgctgtccctggagccggatacccgtgcagcgctcatcgcgacgccagtgtggttcatcattttgggtatcggttggttgtccatcggtggagctaagggcgctaagcatcgcagccaaataacctcccactaaagctcctgggttagactcga

SEQ ID NO: 198 - protein, 453 aa, Corynebacterium glutamicum
LSNRHLQLIAIGGAIGTGLFMGSGKTISVAGPSVILVYAIIGFMLFFVMRAMGELLLANLNYKSLRDAVSDILGPGAGFVTGWTYWFCWIATGMADIVAITGYTQYWWPEIPLWLPGVLTIALLFALNLAAVRLFGEMEFWFAIIKIVAIVSLIVVGLFMVVTAFESPNGTTAQFNNLIEHGGFFPNGITGFLAGFQIAIFAFVGIELAGTAAAETENPTKTLPRAINSIPIRIVVFYVLALAVIMMVTPWDQVRADNSPFVQMFALAGIPAAAGIINFVVITSAASSANSGIFSTSRMLYGLSLEGAAPKRWSRLSKNLVPARGLTFSVICLIPAVGLLYAGGTVIEAFTLITTVSSVLFMVVWSYILVAYIVYRRNSPELHKKSIFKMPGGVVMAVVVLVFFAAMLVVLSLEPDTRAALIATPVWFIILGIGWLSIGGAKGAKHRSQITSH

SEQ ID NO: 199 - DNA, 1242 bp, Corynebacterium glutamicum
  CDS (101)..(1219): RXA00090
ttgatcagccgaaccatcatcgcgcctttcgaaattccagtttcagtaatcctgggcatcatcggcgcagtggtcttcgtgatcatgattgtgaggcaacgtggccgtggataaagatattgaaaaccgcacctcagacctttctcgatgggaaactatggaggaatcagcaacggtcgagggacgcaccgatgtcgaactagcatcagcgccgagcaaacgacgcacctcaggtgcattccaaacagcgcgcgccaagcgccgctactggatcatcatggccgcgctgctggtcaccgcgcttgccttcacctggggcctcatttggtacaagaacccgatgcccgttgggcatccggccttcgcgctgattgcagaacgacgcatggagtcggtctttgtcatgctgattgttgcggtttgccaaggctttgcgacggttgcgttccagaccgtcaccaacaaccgcattatcacgccgtcgatcatgggctttgaatctctctacacactgattcatacctccacagtgttcttcttcggcgcaactgcactgctggccaccagaaatctcgaaatgtttgtcggccagctggtgatcatggttcttttgaccttggtcctctacacctggctgctttccggaaaacgcggcgatatgcacgccatgctgcttgtcggcatcatcattggtggcggactcggatccatctccacctttatgcagcgcattctgaccccatcagaattcgatattctttccgcccgacttttcggatcagtaaacaacgcggaaaccgaatacttcccaattgctgttccactagtagtagtggcgtccgtcttgttgctgctaagctctcgacgcctcaacgttgtagggcttggcaaagatgccgcaaccaaccttggaattaatcaccgacgatcctccatttacacactggttctcgtctctgtattaatggcagtatccaccgcacttgtcggaccgatgacattcctcggattcttggtcgcgaccttggcatatcaattcgccgacacttacgaccaccgatacatccttccgatgtccgcactcatcggattcgtcgtactcagcggcgcttactttgtcatgaaccacgtgttccgcgcacaaggcgtcgtgtccatcattattgagatggtcggcggtaccgtcttcctcatcgtcatcctcagaaagggcagactgtgattacgttaactaatgtccgc

SEQ ID NO: 200 - protein, 373 aa, Corynebacterium glutamicum
VAVDKDIENRTSDLSRWETMEESATVEGRTDVELASAPSKRRTSGAFQTARAKRRYWIIMAALLVTALAFTWGLIWYKNPMPVGHPAFALIAERRMESVFVMLIVAVCQGFATVAFQTVTNNRIITPSIMGFESLYTLIHTSTVFFFGATALLATRNLEMFVGQLVIMVLLTLVLYTWLLSGKRGDMHAMLLVGIIIGGGLGSISTFMQRILTPSEFDILSARLFGSVNNAETEYFPIAVPLVVVASVLLLLSSRRLNVVGLGKDAATNLGINHRRSSIYTLVLVSVLMAVSTALVGPMTFLGFLVATLAYQFADTYDHRYILPMSALIGFVVLSGAYFVMNHVFRAQGVVSIIIEMVGGTVFLIVILRKGRL

SEQ ID NO: 201 - DNA, 1122 bp, Corynebacterium glutamicum
  CDS (101)..(1099): RXA00089
acctcgttttggccgcaagttctcgttagttaaaaactgtaggaaaccaggttccacacatgacacacaatcggtttaacagggaaggggatcggcactgatggcaacaccagcatcggctcccacttccgaaccacgtctcaaacgcaccagagccaagctttttgattggaagcttctcatcggcatcattttcgtcgccggcctcgtggtgctttccctcctcaccggccaatacgacattttcggtggcgatgatggccaactgatgttcgaggcagttcgcatcccgcgtaccgtttccctcattttgtccggtgcagcaatggcgatgtgtggcttagtcatgcagctgttgacccaaaacaaattcgtggaacccagcaccacaggaacaaccgaatgggcaggtcttggcctcctcttcgtgatttacttcgtgccagccgcgaccgttttggatcgcatgctcggtgccgtggtgttttccttcatcggaaccatggtgttcttcctctttctacgccgagtaacactgcgttcctcattgatcgtcccgattatcggcatcatgctcggtgccgtggtgtcatcgatctccagcttcttcgccttgcaattcgacatgctccagcaattgggaacatggtttgcgggttcctttaatacagtgttccgcggacagtacgaagtgctgtggatcgttgtcatcgtcgttattgcagtgttcttcttcgcagaccggctcaccgtagctggccttggcgaggaaatcgcgacaaacgtgggtctcaattacaaccgcatggtccttatcggaactggcctcatcgccatcgcaacaggtgtggtcaccgtcgtggttggtagcctgccattcctcggactcatcgtgcccaacgttgtgtccatgttccgtggcgatgacctgcgctcgaacctgccatgggtatgcctaaccggcatcgcgatcgtaaccatttgtgacttgatcagccgaaccatcatcgcgcctttcgaaattccagtttcagtaatcctgggcatcatcggcgcagtggtcttcgtgatcatgattgtgaggcaacgtggccgtggataaagatattgaaaaccgcacct

SEQ ID NO: 202 - protein, 333 aa, Corynebacterium glutamicum
MATPASAPTSEPRLKRTRAKLFDWKLLIGIIFVAGLVVLSLLTGQYDIFGGDDGQLMFEAVRIPRTVSLILSGAAMAMCGLVMQLLTQNKFVEPSTTGTTEWAGLGLLFVIYFVPAATVLDRMLGAVVFSFIGTMVFFLFLRRVTLRSSLIVPIIGIMLGAVVSSISSFFALQFDMLQQLGTWFAGSFNTVFRGQYEVLWIVVIVVIAVFFFADRLTVAGLGEEIATNVGLNYNRMVLIGTGLIAIATGVVTVVVGSLPFLGLIVPNVVSMFRGDDLRSNLPWVCLTGIAIVTICDLISRTIIAPFEIPVSVILGIIGAVVFVIMIVRQRGRG

SEQ ID NO: 203 - DNA, 749 bp, Corynebacterium glutamicum
  CDS (1)..(726): RXN01285
ctcaacgtcaccatccccgacaacaccttcaccgccatcatcggccccaacggctgcggcaaatccaccctgctccgcggtttctcccgcgtgctcaatccgcagcacggcaaagtgcttctcgacggtcggcaactcgattcattcaagcctaaagagatcgcccgagaactaggcctgctgccacagacctccatcgccccagaaggcatccgggtttacgatctcatcgcgcgcgggcgcgctccctaccaaagcctcatacaacaatggcgcacctccgacgaagacgccgtcgcgcaagcgctcgcctccacgaatctcaccgaacttgcagctcgcctcgtcgatgaactctccggtggccagcgccaacgagtgtgggtggccatgttgctcgcccagcaaacaccgatcatgcttctcgacgagcccaccaccttcctcgacatcgcccaccaatacgaactcttggaattgctgcgcgcattcaacgaggccgggaaaactgtggtcactgtgcttcacgatctcaaccaagccgcccgctacgccgaccacctcatcgtgatgaaagatgggcacgtacatgccacgggcacaccggaggaagtcttaactgccgagatggttcaaggagtttttggcctgccctgcatcatctccccagaccccgtcacaggaacccccaccgtcgttcccctcagtcggtctcgcgcaggagcttaagtagctacccctccaacgga

SEQ ID NO: 204 - protein, 242 aa, Corynebacterium glutamicum
LNVTIPDNTFTAIIGPNGCGKSTLLRGFSRVLNPQHGKVLLDGRQLDSFKPKEIARELGLLPQTSIAPEGIRVYDLIARGRAPYQSLIQQWRTSDEDAVAQALASTNLTELAARLVDELSGGQRQRVWVAMLLAQQTPIMLLDEPTTFLDIAHQYELLELLRAFNEAGKTVVTVLHDLNQAARYADHLIVMKDGHVHATGTPEEVLTAEMVQGVFGLPCIISPDPVTGTPTVVPLSRSRAGA

SEQ ID NO: 205 - DNA, 566 bp, Corynebacterium glutamicum
  CDS (1)..(543): FRXA01285
ccacagacctccatcgccccagaaggcatccgggtttacgatctcatcgcgcgcgggcgcgctccctaccaaagcctcatacaacaatggcgcacctccgacgaagacgccgtcgcgcaagcgctcgcctccacgaatctcaccgaacttgcagctcgcctcgtcgatgaactctccggtggccagcgccaacgagtgtgggtggccatgttgctcgcccagcaaacaccgatcatgcttctcgacgagcccaccaccttcctcgacatcgcccaccaatacgaactcttggaattgctgcgcgcattcaacgaggccgggaaaactgtggtcactgtgcttcacgatctcaaccaagccgcccgctacgccgaccacctcatcgtgatgaaagatgggcacgtacatgccacgggcacaccggaggaagtcttaactgccgagatggttcaaggagtttttggcctgccctgcatcatctccccagaccccgtcacaggaacccccaccgtcgttcccctcagtcggtctcgcgcaggagcttaagtagctacccctccaacgga

SEQ ID NO: 206 - protein, 181 aa, Corynebacterium glutamicum
PQTSIAPEGIRVYDLIARGRAPYQSLIQQWRTSDEDAVAQALASTNLTELAARLVDELSGGQRQRVWVAMLLAQQTPIMLLDEPTTFLDIAHQYELLELLRAFNEAGKTVVTVLHDLNQAARYADHLIVMKDGHVHATGTPEEVLTAEMVQGVFGLPCIISPDPVTGTPTVVPLSRSRAGA

SEQ ID NO: 207 - DNA, 936 bp, Corynebacterium glutamicum
  CDS (101)..(913): RXA02728
atcccatacgttgccttccgatcggcattttcacagcgctggtcggcggcccaacattcttcataatgttgcgccgaatgatgaaaagggcgtgcactaaatggccattgtttccctcgacaacgtcaccgtatccattgaaggaaaaaagcttctcgacgccgtctccctcaaggcctaccccggggaagtgttgggactcatcggcccaaacggtgccggaaaatccactctgctgagtgtcctttcaggcgatcggcttcccgattcaggcgaagtcaacgtcggtggcttagatcccgcaacagcagcggcatccgatatggccagggtgcgagcagtcatgcttcaagatgtcagcgtggcattttccttcctcgtgtgggacgtcgtagaaatgggcaggcggccgtggcagaaggcgtcaacccccgaagaggatcatgaaatcatcgaagcagcgcttgccgccacctcggtatcgcaccttgccgaacgtgaaatcaccacactgtcaggcggcgagcgggcacgcgttgccttgtcccgtgtccttgctcagcaaacccccattgtgctgttggacgaaccaacagccgcgatggatatcagccaccaagaacaaactctgggcacagcgcgagcactggcagccgccggggcagcagtgattgtggtccttcatgatctcaatgcggccgctgcatattgcgacagcattgtgtgtctcagtgatggtcgagtgattgcctccggttctgttgatcaggtgtattccacggaaacgctgtcccgtgtttacggttggcctatcagggtcgatcatagtggaaaatatgttcgagtggagccggaccgttctgaggcgaatttaccctccgtactacaggtgaaaaatacggtttcaccagcttagatacatgactaactaaggtt

SEQ ID NO: 208 - protein, 271 aa, Corynebacterium glutamicum
MAIVSLDNVTVSIEGKKLLDAVSLKAYPGEVLGLIGPNGAGKSTLLSVLSGDRLPDSGEVNVGGLDPATAAASDMARVRAVMLQDVSVAFSFLVWDVVEMGRRPWQKASTPEEDHEIIEAALAATSVSHLAEREITTLSGGERARVALSRVLAQQTPIVLLDEPTAAMDISHQEQTLGTARALAAAGAAVIVVLHDLNAAAAYCDSIVCLSDGRVIASGSVDQVYSTETLSRVYGWPIRVDHSGKYVRVEPDRSEANLPSVLQVKNTVSPA

SEQ ID NO: 209 - DNA, 903 bp, Corynebacterium glutamicum
  CDS (101)..(880): RXN03080
cttgcaaacaggcgtggtggtggcgttcattggctcaccaattttcctttatttactgctcagcatgcgcaagcgacgcggattggggctgtaaaaactcatgcctcaattagttgaaattcgtgatctcaacgttgaattcccctctcgccatgcagtgaaaaacgtgtctttttctgcacctgctggaaaagtcaccgcactgattggcccaaatggtgctggtaaaagtactgccctttcggcgattgcaggattggttgaatccaccggcgaggtaatggttggtgggagtggggttgcgtcgaaaagcgctaaagcccgagcccgcctgctctcactcgtgccgcaaaacaccgagttgcgcattggttttagtgcacgcgacgttgtcgcgatgggccgctacccgcatcgtggccgcttcgccgtggagaccgacgcagatcgacgcgccaccgatgacgccctgcgcgccatcaacgcgctcgacatcgccgagcagcccgtcaacgaattatcgggcggccagcagcagctcatccacatcggccgagcgctcgcccaagacaccgccgtcgtgcttctcgacgagcccgtctccgcccttgatctacggcaccaagttgaagtccttcaactcctgcgcgcccgagctaattccggcaccaccgtgatcgtcgtccttcacgatctcaaccacgttgcccgttggtgcgaccatgcagtgttgatggccgacggcgaagttgtctcccaaggtgacatccgcgaggtgctcgaacctgccacactgtccaccgtgtacggactgcccattgcggtgcgcgatgatcccgaaaccagctcacttcgcgtgatcccgcatccaaatcccttttgattgaaagtttgacttaaaaa

SEQ ID NO: 210 - protein, 260 aa, Corynebacterium glutamicum
MPQLVEIRDLNVEFPSRHAVKNVSFSAPAGKVTALIGPNGAGKSTALSAIAGLVESTGEVMVGGSGVASKSAKARARLLSLVPQNTELRIGFSARDVVAMGRYPHRGRFAVETDADRRATDDALRAINALDIAEQPVNELSGGQQQLIHIGRALAQDTAVVLLDEPVSALDLRHQVEVLQLLRARANSGTTVIVVLHDLNHVARWCDHAVLMADGEVVSQGDIREVLEPATLSTVYGLPIAVRDDPETSSLRVIPHPNPF

SEQ ID NO: 211 - DNA, 903 bp, Corynebacterium glutamicum; identical to SEQ ID NO: 209
  CDS (101)..(880): FRXA02864

SEQ ID NO: 212 - protein, 260 aa, Corynebacterium glutamicum; identical to SEQ ID NO: 210

SEQ ID NO: 213 - DNA, 1149 bp, Corynebacterium glutamicum
  CDS (101)..(1126): RXN00523
tggtgactcgtccgagtgaaattgccgtgggcatcatcatgccgatcattggtgcgccactgtttatttggattattcgtcgtcagaaagtcaaagagctatgagccttagccatcaactcaagcgccagcgcgcatcgcgcaactcccgcaggtggctgattgttgcggcattgggcgtcgtcacgcttggtatttttgctttttctttgatgtggggcgaggtgttttatggccctgctcaggtgctgaaagtgttgtctggacagcaggttcccggcgcgagttattccgttggcgtgttgcgtttgccgcgcgcggtgatgggtttgactgcgggtttggcgtttggcgcggcgggcgtgatttttcagacggtgttgcgtaatcagttggcgtcgccggatattatcggcatttcttctggcgcgtcggcggcgggcgtaatttgcattgtgtttttcgggatgtcgcagtctgcagtgtcggcgatttctttgtgtgcgtccttggctgtggcgttgttgatttatctggtggcgtatcgcggtggtttttcggccacgcgtctgattcttaccggcattggtattgctgcgatgctgaattcattagtgtcgtattcgctgtccaaggctgattcttgggatctgccgaccgcgacgcgctggcttaccggctcgctcaatggtgcgacgtgggatcgtgcgatgccgctgattgtcaccactgtggtactcattccgctgctggtggctaatgcgcgcaatgtggatcttatgcgtttgggcaatgattccgcggtgggtttgggcgttgctactaatcgcacgcgcgtcattgcgattattgccgctgttgcgctcatcgccgttgctaccgctgcatgcggcccgatcgcattcgtggcgtttgtgtctggccccattgccgcgcgcattttaggctccggcggatcgctcatcatcccctccgcactcatcggcgggttgatcgtgctcatcgccgacctaattggccaatacttcctcggcacccgctaccccgtcggagttgtcaccggcgcattcggcgccccattccttatctatttactcattcgttccaaccgcgcgggagtaaccctgtgaccaccaaccatcaactatcc

SEQ ID NO: 214 - protein, 342 aa, Corynebacterium glutamicum
MSLSHQLKRQRASRNSRRWLIVAALGVVTLGIFAFSLMWGEVFYGPAQVLKVLSGQQVPGASYSVGVLRLPRAVMGLTAGLAFGAAGVIFQTVLRNQLASPDIIGISSGASAAGVICIVFFGMSQSAVSAISLCASLAVALLIYLVAYRGGFSATRLILTGIGIAAMLNSLVSYSLSKADSWDLPTATRWLTGSLNGATWDRAMPLIVTTVVLIPLLVANARNVDLMRLGNDSAVGLGVATNRTRVIAIIAAVALIAVATAACGPIAFVAFVSGPIAARILGSGGSLIIPSALIGGLIVLIADLIGQYFLGTRYPVGVVTGAFGAPFLIYLLIRSNRAGVTL

SEQ ID NO: 215 - DNA, 802 bp, Corynebacterium glutamicum
  CDS (30)..(779): FRXA00523
tggcgcggcgggcgtgaatttttcagacggtgttgcgtaatcagttggcgtcgccggatattatcggcatttcttctggcgcgtcggcggcgggcgtaatttgcattgtgtttttcggaatgtcgcagtctgcagtgtcggcgatttctttgtgtgcgtccttggctgtggcgttgttgatttatctggtggcgtatcgcggtggtttttcggccacgcgtctgattcttaccggcattggtattgctgcgatgctgaattcattagtgtcgtattcgctgtccaaggctgattcttgggatctgccgaccgcgacgcgctggcttaccggctcgctcaatggtgcgacgtgggatcgtgcgatgccgctgattgtcaccactgtggtactcattccgctgctggtggctaatgcgcgcaatgtggatcttatgcgtttgggcaatgattccgcggtgggtttgggcgttgctactaatcgcacgcgcgtcattgcgattattgccgctgttgcgctcatcgccgttgctaccgctgcatgcggcccgatcgcattcgtggcgtttgtgtctggccccattgccgcgcgcattttaggctccggcggatcgctcatcatcccctccgcactcatcggcgggttgatcgtgctcatcgccgacctaattggccaatacttcctcggcacccgctaccccgtcggagttgtcaccggcgcattcggcgccccattccttatctatttactcattcgttccaaccgcgcgggagtaaccctgtgaccaccaaccatcaactatcc

SEQ ID NO: 216 - protein, 250 aa, Corynebacterium glutamicum
VLRNQLASPDIIGISSGASAAGVICIVFFGMSQSAVSAISLCASLAVALLIYLVAYRGGFSATRLILTGIGIAAMLNSLVSYSLSKADSWDLPTATRWLTGSLNGATWDRAMPLIVTTVVLIPLLVANARNVDLMRLGNDSAVGLGVATNRTRVIAIIAAVALIAVATAACGPIAFVAFVSGPIAARILGSGGSLIIPSALIGGLIVLIADLIGQYFLGTRYPVGVVTGAFGAPFLIYLLIRSNRAGVTL

SEQ ID NO: 217 - DNA, 1167 bp, Corynebacterium glutamicum
  CDS (101)..(1144): RXA01289
ctcacctaagatgttctaagcgttttagtttcagctagttttaaggactttcgatgtctcatacttttctttccccctcgatctttaggagtcacgcgatatgacggcggtggcggtagagaagcagaaggagacgtcgataagcaaaaacctcggcaggcgccgagcgctgggcattctcggaatcgtcgtggcactgggtgcgcttattgttttaagtattgctgtgggtgcgaacccactttcttttagctccgtatggcagggttttaccgcacacgacagctctgaggcgtcgattatcgtgtggtcaatgcgtattccgcgcacgctggtgggcatcgtgactggcgctgcttttggtgtggcgggtgctttaattcaagcgctgacgcgcaacccgcttgccgatcccggaattttgggagttaacgcgggtgcaggtttcgcagtgaccgtaggtgtcggatttttcggactcagcagcgtgacgggctacatctggttcgcattcctgggcgctgccgccgctaccctgctggtgtatttcattggtgcgagcaccagcggcagcgttaatcctgttgctctggtcctcgccggcgttgctctggccgccgtgcttggtggcgtcacgagcttcctcacactgattgatcctgagacttttgaaagcatccgcaattggaatcttggttctgttgcacgcaccgacctcagcgacaccatgaccgtattgccattcctggcagtcggactggccatcgcgctcctgctgtcgggagcactgaactccattgcgcttggcgatgaccttgctgcatccctgggcaccaaagtgatgcgcacccgcgtgctcggcatcatttcagtcaccttgttggccggcggcgcgaccgcccttactggtggtatcggcttcgtaggccttatggttccccacgttgtgcgctgggtagttggccccgatcaacgatggatcatcaccttcagcgccctgtgcgcccctgttcttgtactcggcgcagacattttgggacgcatcatcgcccgccccggcgaaattgaagtaggcattgttaccgcagtcatcggcgcacctgtcctgatcgcactagttcgacggaggaaagccagtggtctttaatatcaaatctagaactgatg

SEQ ID NO: 218 - protein, 348 aa, Corynebacterium glutamicum
MTAVAVEKQKETSISKNLGRRRALGILGIVVALGALIVLSIAVGANPLSFSSVWQGFTAHDSSEASIIVWSMRIPRTLVGIVTGAAFGVAGALIQALTRNPLADPGILGVNAGAGFAVTVGVGFFGLSSVTGYIWFAFLGAAAATLLVYFIGASTSGSVNPVALVLAGVALAAVLGGVTSFLTLIDPETFESIRNWNLGSVARTDLSDTMTVLPFLAVGLAIALLLSGALNSIALGDDLAASLGTKVMRTRVLGIISVTLLAGGATALTGGIGFVGLMVPHVVRWVVGPDQRWIITFSALCAPVLVLGADILGRIIARPGEIEVGIVTAVIGAPVLIALVRRRKASGL

SEQ ID NO: 219 - DNA, 1287 bp, Corynebacterium glutamicum
  CDS (101)..(1264): RXA01290
ggacgcatcatcgcccgccccggcgaaattgaagtaggcattgttaccgcagtcatcggcgcacctgtcctgatcgcactagttcgacggaggaaagccagtggtctttaatatcaaatctagaactgatgaaactcctgttgctgcgtctgagccggtggaatccactagacctgtgtctgaagcttcgacaagccctgcgcttaaccccggctaccacgcagtttcagtgcagaggcgccggttctctttccgcatcccagcccgcctcatggtggttagccttatccttttcgccatcgcgctatgcagcgccacatgggctatcacgatgggcgattacccactgtctttggggcaggtgattaatgcacttgctggcaccggcgagaaattccagttgttggtggtgcgggaatggcgtctacctgtagccattgctgctgttgtcttcggcgcgctgcttggcataggtggagcgattttccagtcgattactcgaaacccgttgggttcacctgacgtgattggtttcgatgcaggttcttacacggcggtggttcttgtcattttggtcctcggcaacactcactactggagcatcgctttcgctgccatcgtcggtggcattgttaccgcctttgccgtgtatgtcctggcgtggcgtaaaggtgtgcaaggtttccgcttgatcatcgtgggcatcggtgtctcggccatgctcagttccgttaacgcgtatctaatcacccgcgccgatgtggaagacgccatggttgtgggcttctggagtgccggttccatcaaccgcattacctggcaatctctgctcccctctctggtgatcgctgctgtcatcatcgtggccgccattgtgctggcaaggtcactgcgtttcatggaaatgggcgatgacgtagccaccaccctcggtgtgaaaacaaactccacccgcttggcactcatcgttgtcggcgttgctacctccgcgttggttacagcagctgccggaccgatctccttcatcgcgttggttgccccacagctggcacgtcgcctcactaaaacccctggtgtcagcctggttgctgccgctgcaatgggttccgcactgctcagctgcgctcacctcctttccctgattatcagctccttctaccgcaccatcccggttggcctgttgactgtatccatcggtggttgctacatgatctggcttctgctgcgcgaaacccgccgccaataccgcaccggcaccatccgatagttcttttaaggatccctcat

SEQ ID NO: 220 - protein, 388 aa, Corynebacterium glutamicum
VVFNIKSRTDETPVAASEPVESTRPVSEASTSPALNPGYHAVSVQRRRFSFRIPARLMVVSLILFAIALCSATWAITMGDYPLSLGQVINALAGTGEKFQLLVVREWRLPVAIAAVVFGALLGIGGAIFQSITRNPLGSPDVIGFDAGSYTAVVLVILVLGNTHYWSIAFAAIVGGIVTAFAVYVLAWRKGVQGFRLIIVGIGVSAMLSSVNAYLITRADVEDAMVVGFWSAGSINRITWQSLLPSLVIAAVIIVAAIVLARSLRFMEMGDDVATTLGVKTNSTRLALIVVGVATSALVTAAAGPISFIALVAPQLARRLTKTPGVSLVAAAAMGSALLSCAHLLSLIISSFYRTIPVGLLTVSIGGCYMIWLLLRETRRQYRTGTIR

SEQ ID NO: 221 - DNA, 605 bp, Corynebacterium glutamicum
  CDS (1)..(582): RXA01822
atggccagacaaaatagcaataccggcgggttgcgtctggtgttggttggtatcggaacaggtgcatttttgggtgctgctcgtgatttcttcatggtgcgcgcagatattacgggtgcttcgacggtacagctgtggtctgccggttcgttgagcgggcgcgactggaatcatgccctgttggtgttgatttcgtgtgcagtgattgtgccagcactgtgcattattgtccgccgtttacgcctgatggaaatgggtgatgatgcagctggggcacttggaatttcagtggagagaacacggttgatagccattttgttggctgtgctgctggtggggatcgccaccgcagctgcaggtcccatcgcttttattgcactggcagcacctcagattgcccgggctctggcccgggaggatggagtgctggtggctgcgtcgataagcattggctctgggctgttagttgcggcggattgcctagagcaacacgttgatactgagctgcacacgcccgttggcctggtgaccagtttgctgggcggggtgtatttgatgtggcttttgagccgaaaggaggcataaatgctgcaagcgcatgatct

SEQ ID NO: 222 - protein, 194 aa, Corynebacterium glutamicum
MARQNSNTGGLRLVLVGIGTGAFLGAARDFFMVRADITGASTVQLWSAGSLSGRDWNHALLVLISCAVIVPALCIIVRRLRLMEMGDDAAGALGISVERTRLIAILLAVLLVGIATAAAGPIAFIALAAPQIARALAREDGVLVAASISIGSGLLVAADCLEQHVDTELHTPVGLVTSLLGGVYLMWLLSRKEA

SEQ ID NO: 223 - DNA, 1119 bp, Corynebacterium glutamicum
  CDS (101)..(1096): RXN00466
tttaaaagcgcactaagagctcgtcaattctttaaaacaagctgagaatgtgaataataggataggttaacctgattcgattagaaaacggagatttgtcgtgcaatcccgcctgtccaaaatcctgcgcagtagcgtcgtaggcgttgctgtcctagccctgttagctgggtgttctaacaatgcagatgacaccgacgctgattcaacatccacgggaaactccgcttttcctgtttcgattgaacacgagttcggaaccaccacaatcgatgatgtacccgaaagagttgtcacccttggcgttaccgacgccgatattgtcctcgcattggggaccgtcccagtaggcaacaccggatacaaattcttcgaaaacggattgggaccgtggactgatgagttagtggaaggcaaagaattaacactgcttgactctgattccacaccagatcttgaacaagtagcagccctggagccagacctgattattggagtctctgcggggtttgacgacgttgtatacgagcaactatctgatatcgcaccggtggtcgcccgtccagcgggaacagctgcatacgcagtagctcgcgaggaagctaccaaccttgttgcccgtgcgatggggcaatcagaaaaaggacaagagctcaatgaggaaacagatgctctgatccaagctgcgcgtgatgaaaatccttcttttgacggtaaaacaggaaccgtcatcttgccataccagggtaaatacggtgcctacctgccaggcgatgcacggggacaattcctcgattcacttggcatttcgctgccggaagcagttctttcgcgagacaccggcgacagcttctttgtcgatgtccccgctgaaagcgtcaaagacgtagacggtgatgttctcctcgtgctttccaacgacgaaaatctggatatcacagcagagaatccactgtttgaaacactcaacgttgtgcaaaaagacgcagtaattgtggcaacaaccgaagaacgcggggcgattacctacaactcagtgctgtctgttccttttgcgttggaacatctcgcaccacgtattgctgaggctttgaagtaaaactcaactactcgagcaca

SEQ ID NO: 224 - protein, 332 aa, Corynebacterium glutamicum
VQSRLSKILRSSVVGVAVLALLAGCSNNADDTDADSTSTGNSAFPVSIEHEFGTTTIDDVPERVVTLGVTDADIVLALGTVPVGNTGYKFFENGLGPWTDELVEGKELTLLDSDSTPDLEQVAALEPDLIIGVSAGFDDVVYEQLSDIAPVVARPAGTAAYAVAREEATNLVARAMGQSEKGQELNEETDALIQAARDENPSFDGKTGTVILPYQGKYGAYLPGDARGQFLDSLGISLPEAVLSRDTGDSFFVDVPAESVKDVDGDVLLVLSNDENLDITAENPLFETLNVVQKDAVIVATTEERGAITYNSVLSVPFALEHLAPRIAEALK

SEQ ID NO: 225 - DNA, 1087 bp, Corynebacterium glutamicum
  CDS (101)..(1087): FRXA00466
tttaaaagcgcactaagagctcgtcaattctttaaaacaagctgagaatgtgaataataggataggttaacctgattcgattagaaaacggagatttgtcgtgcaatcccgcctgtccaaaatcctgcgcagtagcgtcgtaggcgttgctgtcctagccctgttagctgggtgttctaacaatgcagatgacaccgacgctgattcaacatccacgggaaactccgcttttcctgtttcgattgaacacgagttcggaaccaccacaatcgatgatgtacccgaaagagttgtcacccttggcgttaccgacgccgatattgtcctcgcattggggaccgtcccagtaggcaacaccggatacaaattcttcgaaaacggattgggaccgtggactgatgagttagtggaaggcaaagaattaacactgcttgactctgattccacaccagatcttgaacaagtagcagccctggagccagacctgattattggagtctctgcggggtttgacgacgttgtatacgagcaactatctgatatcgcaccggtggtcgcccgtccagcgggaacagctgcatacgcagtagctcgcgaggaagctaccaaccttgttgcccgtgcgatggggcaatcagaaaaaggacaagagctcaatgaggaaacagatgctctgatccaagctgcgcgtgatgaaaatccttcttttgacggtaaaacaggaaccgtcatcttgccataccagggtaaatacggtgcctacctgccaggcgatgcacggggacaattcctcgattcacttggcatttcgctgccggaagcagttctttcgcgagacaccggcgacagcttctttgtcgatgtccccgctgaaagcgtcaaagacgtagacggtgatgttctcctcgtgctttccaacgacgaaaatctggatatcacagcagagaatccactgtttgaaacactcaacgttgtgcaaaaagacgcagtaattgtggcaacaaccgaagaacgcggggcgattacctacaactcagtgctgtctgttccttttgcgttggaacatctcgcaccacgtattgctgag

SEQ ID NO: 226 - protein, 329 aa, Corynebacterium glutamicum
VQSRLSKILRSSVVGVAVLALLAGCSNNADDTDADSTSTGNSAFPVSIEHEFGTTTIDDVPERVVTLGVTDADIVLALGTVPVGNTGYKFFENGLGPWTDELVEGKELTLLDSDSTPDLEQVAALEPDLIIGVSAGFDDVVYEQLSDIAPVVARPAGTAAYAVAREEATNLVARAMGQSEKGQELNEETDALIQAARDENPSFDGKTGTVILPYQGKYGAYLPGDARGQFLDSLGISLPEAVLSRDTGDSFFVDVPAESVKDVDGDVLLVLSNDENLDITAENPLFETLNVVQKDAVIVATTEERGAITYNSVLSVPFALEHLAPRIAE

SEQ ID NO: 227 - DNA, 582 bp, Corynebacterium glutamicum
  CDS (101)..(559): RXN03081
acggactgcccattgcggtgcgcgatgatcccgaaaccagctcacttcgcgtgatcccgcatccaaatcccttttgattgaaagtttgacttaaaaacccatgaaaaaatcactcatcgccattgttgccagtgcgctcgtgttaagcggctgcacctctgattcttctgactcttccggcacttccggaactgtggaaaccacttcgattacaaccagcgttgccgcagctgacggcgcattcccacgcaccgtcacactcgacgattcctccatcaccttagaatccaaaccagagcgcatcgccgtactcaccccagaggcagcatccttggttctccccatcacaggcgccgaccgcgtcgtgatgaccgccgaaatggacaccgctgacgaagaaaccgcagctctggcctcccaagtggaataccaagtcaaaaacggtggcaggctcgaccccgaacaagttgtcgccggcgacccagatttggtgatcgtcagtgcgcgtttcgataccgaacaaggcaccatcgacattttggaaggcctcaacgtcccgtagttaacttcgattcagacgct

SEQ ID NO: 228 - protein, 153 aa, Corynebacterium glutamicum
MKKSLIAIVASALVLSGCTSDSSDSSGTSGTVETTSITTSVAAADGAFPRTVTLDDSSITLESKPERIAVLTPEAASLVLPITGADRVVMTAEMDTADEETAALASQVEYQVKNGGRLDPEQVVAGDPDLVIVSARFDTEQGTIDILEGLNVP

SEQ ID NO: 229 - DNA, 1098 bp, Corynebacterium glutamicum
  CDS (101)..(1075): FRXA02863
acggactgcccattgcggtgcgcgatgatcccgaaaccagctcacttcgcgtgatcccgcatccaaatcccttttgattgaaagtttgacttaaaaacccatgaaaaaatcactcatcgccattgttgccagtgcgctcgtgttaagcggctgcacctctgattcttctgactcttccggcacttccggaactgtggaaaccacttcgattacaaccagcgttgccgcagctgacggcgcattcccacgcaccgtcacactcgacgattcctccatcaccttagaatccaaaccagagcgcatcgccgtactcaccccagaggcagcatccttggttctccccatcacaggcgccgaccgcgtcgtgatgaccgccgaaatggacaccgctgacgaagaaaccgcagctctggcctcccaagtggaataccaagtcaaaaacggtggcagcctcgaccccgaacaagttgtcgccggcgacccagatttggtgatcgtcagtgcgcgtttcgataccgaacaaggcaccatcgacattttggaaggcctcaacgtccccgtagttaacttcgattcagacgcttggggagacatcgacgccatcaccaaacacctagaaattgtgggtgaactcgtcggcgaagaagacaaagccgcagaagcaatcgcagaaatcgatgcaaaccgcatcgacatcgacaagcctgccacctcccccactgtgctcactttgatgcaacgcggaccacgccaaatggtcatgccagaatctgccatgctcaacggcctgatccgcgaagccggcggcactccagtggtagattctctcggcgcggtaggcaccatcactgcagacccagaacaagttgttgcgatggcacctgagatcatcatcattcaggacttccaaggtaaaggccgagagaacttcgctaatttcctctccaacccagcgctagccaacgttcccgccattgaaaacgacaagattttctacgccgacactgtcaccactggagttactgcaggtaccgatatcaccactggtctgcagcaagtggcagaaatgctgagctagttttgagatgttgaaactag

SEQ ID NO: 230 - protein, 325 aa, Corynebacterium glutamicum
MKKSLIAIVASALVLSGCTSDSSDSSGTSGTVETTSITTSVAAADGAFPRTVTLDDSSITLESKPERIAVLTPEAASLVLPITGADRVVMTAEMDTADEETAALASQVEYQVKNGGSLDPEQVVAGDPDLVIVSARFDTEQGTIDILEGLNVPVVNFDSDAWGDIDAITKHLEIVGELVGEEDKAAEAIAEIDANRIDIDKPATSPTVLTLMQRGPRQMVMPESAMLNGLIREAGGTPVVDSLGAVGTITADPEQVVAMAPEIIIIQDFQGKGRENFANFLSNPALANVPAIENDKIFYADTVTTGVTAGTDITTGLQQVAEMLS

SEQ ID NO: 231 - DNA, 776 bp, Corynebacterium glutamicum
  CDS (101)..(775): RXS03221
caaaagtattcaaaaaaagtttgttatgtacgattgacgggacatatcgtgtctgccacgattaaagacattggtgatgtgaatcactgcctactacatcgtgtttcgtgaccctgcacctccaagtaagggcacgacaaacttaggagacaagatggctagtaccttcattcaggccgacagccctgaaaaaagtaagaagctgcccccactcacagaaggtccgtatagaaagcggctattctacgttgcactagttgcgacgtttggtgggctgctcttcggatatgacaccggagtaatcaacggtgcactcaacccaatgacacgtgagctcggactaaccgcgttcaccgagggtgttgtaacttcttccctgctgtttggtgcagcagctggtgcgatgtttttcggtcgcatttccgacaactggggtcgccggaaaacaatcatctcacttgcagtagctttctttgtcggcaccatgatctgcgtgtttgctccatcttttgcagtaatggttgtcggacgtgtgcttcttggactcgcagttggtggcgcttccactgttgtccctgtctacctggctgaacttgctccttttgaaatccgtggctcactggctggccgtaatgagttgatgattgttgttggtcagctcgcagcttttgtcatcaatgcgattattggaaatgtttttggacaccacgatggtgtgtggcgctacatgctggcaattgccgcaatcccagcaattgccctcttctttggaatgc

SEQ ID NO: 232 - protein, 225 aa, Corynebacterium glutamicum
VFRDPAPPSKGTTNLGDKMASTFIQADSPEKSKKLPPLTEGPYRKRLFYVALVATFGGLLFGYDTGVINGALNPMTRELGLTAFTEGVVTSSLLFGAAAGAMFFGRISDNWGRRKTIISLAVAFFVGTMICVFAPSFAVMVVGRVLLGLAVGGASTVVPVYLAELAPFEIRGSLAGRNELMIVVGQLAAFVINAIIGNVFGHHDGVWRYMLAIAAIPAIALFFGM

SEQ ID NO: 233 - DNA, 718 bp, Corynebacterium glutamicum
  CDS (101)..(718): FRXA01986
gccacgattaaagacattggtgatgtgaatcactgcctactacatcgtgtttcgtgaccctgcacctccaagtaagggcacgacaaacttaggagacaagatggctagtaccttcattcaggccgacagccctgaaaaaagtaagaagctgcccccactcacagaaggtccgtatagaaagcggctattctacgttgcactagttgcgacgtttggtgggctgctcttcggatatgacaccggagtaatcaacggtgcactcaacccaatgacacgtgagctcggactaaccgcgttcaccgagggtgttgtaacttcttccctgctgtttggtgcagcagctggtgcgatgtttttcggtcgcatttccgacaactggggtcgccggaaaacaatcatctcacttgcagtagctttctttgtcggcaccatgatctgcgtgtttgctccatcttttgcagtaatggttgtcggacgtgtgcttcttggactcgcagttggtggcgcttccactgttgtccctgtctacctggctgaacttgctccttttgaaatccgtggctcactggctggccgtaatgagttgatgattgttgttggtcagctcgcagcttttgtcatcaatgcgattattggaaatgtttttggacaccacgatggtgtgtggcgctacatgctggcaattgccgcaatcccagcaattgccctcttctttgga

SEQ ID NO: 234 - protein, 206 aa, Corynebacterium glutamicum
MASTFIQADSPEKSKKLPPLTEGPYRKRLFYVALVATFGGLLFGYDTGVINGALNPMTRELGLTAFTEGVVTSSLLFGAAAGAMFFGRISDNWGRRKTIISLAVAFFVGTMICVFAPSFAVMVVGRVLLGLAVGGASTVVPVYLAELAPFEIRGSLAGRNELMIVVGQLAAFVINAIIGNVFGHHDGVWRYMLAIAAIPAIALFFG

SEQ ID NO: 235 - DNA, 1118 bp, Corynebacterium glutamicum
  CDS (1)..(1095): RXN02447
acagtagttccggtgtacctcgctgaactcgcaccactagaaatccgcggctccctgaccggccgaaacgagcttgctatcgtcaccggccagctgcttgccttcgtgatcaacgcgcttatcgccgtcaccctacacggagttattgatggaatctggcgcatcatgttcgccgtctgtgccctccctgccgtcgccctcttcctcggcatgctgcggatgccggaatcaccacgctggctggtcaaccaggggcgttacgacgacgcccgccgcgtcatggagaccgtccgtacccctgagcgtgcgaaagccgaaatggatgaaatcatcgcggtgcactctgaaaacaatgcggcacttcctggtgttaagcagtcttcgggccaggcttcaggccaggtttctagcaagcacacccacatgtccatcggcgaagtcctcagcaacaaatggctggttcgtctgctcatcgccggcatcggtgttgcagttgcccagcagctcaccggcatcaacgccatcatgtactacggaacccgcgtcctcgaggaatccggcatgagcgcagaaatggctgtggttgccaacattgctttcggtgccgttgccgtcatcggtggactgatcgcactgcgcaacatggaccgcctggatcgccgcaccaccttcatcatcggcctgtcactgaccaccaccttccaccttttgatcgcagctgccggcactctccttccagaaggtaactccattcgaccattcgccatcatgatccttgttgttgggttcgtgctctccatgcagactttcctcaacgttgcagtgtgggtgtggctggcggaaatcttcccagtccgaatgaagggtatcggcaccggtatttcggtattctgcggttggggcatcaatggcgtcctagcgttgttcttcccagcactggtctccggcgtgggtatcaccttctccttccttatcttcgcagtcgtcggagtcattgccctggcgttcgtcaccaagtttgttcctgaaacccgtggccgctcacttgaagaactcgatcacgcagcattcaccggccagatcttcaagaaggcttaaaccccctccgatctctttgg

SEQ ID NO: 236 - protein, 365 aa, Corynebacterium glutamicum
TVVPVYLAELAPLEIRGSLTGRNELAIVTGQLLAFVINALIAVTLHGVIDGIWRIMFAVCALPAVALFLGMLRMPESPRWLVNQGRYDDARRVMETVRTPERAKAEMDEIIAVHSENNAALPGVKQSSGQASGQVSSKHTHMSIGEVLSNKWLVRLLIAGIGVAVAQQLTGINAIMYYGTRVLEESGMSAEMAVVANIAFGAVAVIGGLIALRNMDRLDRRTTFIIGLSLTTTFHLLIAAAGTLLPEGNSIRPFAIMILVVGFVLSMQTFLNVAVWVWLAEIFPVRMKGIGTGISVFCGWGINGVLALFFPALVSGVGITFSFLIFAVVGVIALAFVTKFVPETRGRSLEELDHAAFTGQIFKKA

SEQ ID NO: 237 - DNA, 293 bp, Corynebacterium glutamicum
  CDS (1)..(270): FRXA02447
tgggtgtggctggcggaaatcttcccagtccgaatgaagggtatcggcaccggtatttcggtattctgcggttggggcatcaatggcgtcctagcgttgttcttcccagcactggtctccggcgtgggtatcaccttctccttccttatcttcgcagtcgtcggagtcattgccctggcgttcgtcaccaagtttgttcctgaaacccgtggccgctcacttgaagaactcgatcacgcagcattcaccggccagatcttcaagaaggcttaaaccccctccgatctctttgg

SEQ ID NO: 238 - protein, 90 aa, Corynebacterium glutamicum
WVWLAEIFPVRMKGIGTGISVFCGWGINGVLALFFPALVSGVGITFSFLIFAVVGVIALAFVTKFVPETRGRSLEELDHAAFTGQIFKKA

SEQ ID NO: 239 - DNA, 711 bp, Corynebacterium glutamicum
  CDS (1)..(711): FRXA02769
acagtagttccggtgtacctcgctgaactcgcaccactagaaatccgcggctccctgaccggccgaaacgagcttgctatcgtcaccggccagctgcttgccttcgtgatcaacgcgcttatcgccgtcaccctacacggagttattgatggaatctggcgcatcatgttcgccgtctgtgccctccctgccgtcgccctcttcctcggcatgctgcggatgccggaatcaccacgctggctggtcaaccaggggcgttacgacgacgcccgccgcgtcatggagaccgtccgtacccctgagcgtgcgaaagccgaaatggatgaaatcatcgcggtgcactctgaaaacaatgcggcacttcctggtgttaagcagtcttcgggccaggcttcaggccaggtttctagcaagcacacccacatgtccatcggcgaagtcctcagcaacaaatggctggttcgtctgctcatcgccggcatcggtgttgcagttgcccagcagctcaccggcatcaacgccatcatgtactacggaacccgcgtcctcgaggaatccggcatgagcgcagaaatggctgtggttgccaacattgctttcggtgccgttgccgtcatcggtggactgatcgcactgcgcaacatggaccgcctggatcgccgcaccaccttcatcatcggcctgtcactgaccaccaccttccaccttttg

SEQ ID NO: 240 - protein, 237 aa, Corynebacterium glutamicum
TVVPVYLAELAPLEIRGSLTGRNELAIVTGQLLAFVINALIAVTLHGVIDGIWRIMFAVCALPAVALFLGMLRMPESPRWLVNQGRYDDARRVMETVRTPERAKAEMDEIIAVHSENNAALPGVKQSSGQASGQVSSKHTHMSIGEVLSNKWLVRLLIAGIGVAVAQQLTGINAIMYYGTRVLEESGMSAEMAVVANIAFGAVAVIGGLIALRNMDRLDRRTTFIIGLSLTTTFHLL

SEQ ID NO: 241 - DNA, 725 bp, Corynebacterium glutamicum
  CDS (3)..(695): RXS03220
ccatgggcttaagggaaattttgtccagcaagtggcttgtgcgcatcctcctggtaggtatcggattgggtgtcgcacagcagctgaccggcatcaactccatcatgtactacggccaggttgttctcattgaggctggtttctccgagaatgcagctctgatcgccaacgtggcgccaggagtgatcgcagttgtcggtgcattcatcgcactgtggatgatggatggtatcaaccgccgtaccaccctcattaccggttattctctcaccaccattagccacgtattgatcggtatcgcatccgtagcattcccagtcggcgatcctcttcgcccctacgttatcttgactctggttgtggtcttcgtgggatccatgcagaccttcctcaacgtagctacctgggttatgctctctgagctcttcccgctggcaatgcgcggtttcgcaatcggtatctcagtgttcttcctctggatcgcaaacgcgttcctcggattgttcttcccaaccatcatggaagcagtaggactaaccggaaccttcttcatgttcgccggaatcggtgtggttgccttgatcttcatctacacccaggttcctgaaactcgtggacgtaccttggaggagattgatgaggatgttacttccggtgtcattttcaacaaggacatccgaaaaggaaaggtgcactaaaaacccagacactgcatagataacacg

SEQ ID NO: 242 - protein, 231 aa, Corynebacterium glutamicum
MGLREILSSKWLVRILLVGIGLGVAQQLTGINSIMYYGQVVLIEAGFSENAALIANVAPGVIAVVGAFIALWMMDGINRRTTLITGYSLTTISHVLIGIASVAFPVGDPLRPYVILTLVVVFVGSMQTFLNVATWVMLSELFPLAMRGFAIGISVFFLWIANAFLGLFFPTIMEAVGLTGTFFMFAGIGVVALIFIYTQVPETRGRTLEEIDEDVTSGVIFNKDIRKGKVH

SEQ ID NO: 243 - DNA, 408 bp, Corynebacterium glutamicum
  CDS (101)..(385): FRXA02762
ttcccagtcggcgatcctcttcgcccctacgttatcttgactctggttgtggtcttcgtgggatccatgcagaccttcctcaacggtagctacctgggttatgctctctgagctcttcccgctggcaatgcgcggtttcgcaatcggtatctcagtgttcttcctctggatcgcaaacgcgttcctcggattgttcttcccaaccatcatggaagcagtaggactaaccggaaccttcttcatgttcgccggaatcggtgtggttgccttgatcttcatctacacccaggttcctgaaactcgtggacgtaccttggaggagattgatgaggatgttacttccggtgtcattttcaacaaggacatccgaaaaggaaaggtgcactaaaaacccagacactgcataga

SEQ ID NO: 244 - protein, 95 aa, Corynebacterium glutamicum
MLSELFPLAMRGFAIGISVFFLWIANAFLGLFFPTIMEAVGLTGTFFMFAGIGVVALIFIYTQVPETRGRTLEEIDEDVTSGVIFNKDIRKGKVH

SEQ ID NO: 245 - DNA, 324 bp, Corynebacterium glutamicum
  CDS (101)..(301): FRXA02761
caggttgttctcattgaggtggtttctccgagaatgcagctttgatcgccaacgtggcgccagaagtgatcgcagttgtcgggcattcatcgcactgtggatgatggatggtatcaaccgccgtaccaccctcattaccggttattctctcaccaccattagccacgtattgatcggtatcgcatccgtagcattcccagtcggcgatcctcttcgcccctacgttatcttgactctggttgtggtcttcgtgggatccatgcagaccttcctcaacggtagctacctgggttatgctctctgagctcttcccgctggcaatgc

SEQ ID NO: 246 - protein, 67 aa, Corynebacterium glutamicum
MMDGINRRTTLITGYSLTTISHVLIGIASVAFPVGDPLRPYVILTLVVVFVGSMQTFLNGSYLGYAL

SEQ ID NO: 247 - DNA, 1242 bp, Corynebacterium glutamicum
  CDS (101)..(1219): RXA00123
gaaggatcgtcagaatagctctcgaataggccatttcttacttcatcggcaatactgacttagtagaaattgctgtccagaactgttgaaggagttgaaaatgccaaagaattacgacatcaacggggcgatccgcagacgggatatgctcagacgtcggtaccttcctgattcggcaaattcaactcctgtacctgaagaggtttctccgctgacccgctatgtcaccgacggcatcccgaagcgcccaccgctgggtgccactgttgctgacggtttaaaattcgccgaaggcgcctccaaccgcatggtcatgtcgctgtaccctgcgccatccaagcccgcaatcgaggaattggcagaggcctgggacctccaccccaccatcgtagaagacttgctccttggtcagcagcgcccaaaactagaccgctacgaagacatcatttttatcgcgatccgctccgcgcgctacatcgactcccgcgaagaggtggacttctccgaattccacatcctcatgaagcctcaggccatagccattttgtgccaggataaccaatggattgacggcaccagcgccgccagcttcagcaaccccgaggagatcgataagcgcataaaaacattgcttgccgacgccgagttactctcgtccggcccccgcgccgcggcctataggcttctcgacgccatcgtcgacggcttctcccccgttcttagaggcatcgccatcgaccaggaacagattgagcgccaggtgttctccggcgacgccgccgtcgccgaacgtatttacaacctgtcccaagaaatcatcgacatgcagcacaccaccagctcagttaccgaagtggtgcaacgcctcaacaaagacttcatccgaagtggcatgtccgaagaactccgcgcctacctcgacgacgtcgccgaccacctcacccgcgacaacacccgcgtctccgaataccgcgaatccctatcccaaattttgaacgtcaacgccacccttgtagcccaacgccaaaacgaagacatgaagaaaatctccggatgggccgccatcatcttcgccccaaccctcgtgtcctccatctacggcatgaacttcgacatcatgccagaacttcactgggcgtttggctacccgttggctctcttagcaatgctcggattcaccctccttttgtactggatcttcaaacgcagtaagtggatgtgagacaaaaaccgaaaaaccaa

SEQ ID NO: 248 - protein, 373 aa, Corynebacterium glutamicum
MPKNYDINGAIRRRDMLRRRYLPDSANSTPVPEEVSPLTRYVTDGIPKRPPLGATVADGLKFAEGASNRMVMSLYPAPSKPAIEELAEAWDLHPTIVEDLLLGQQRPKLDRYEDIIFIAIRSARYIDSREEVDFSEFHILMKPQAIAILCQDNQWIDGTSAASFSNPEEIDKRIKTLLADAELLSSGPRAAAYRLLDAIVDGFSPVLRGIAIDQEQIERQVFSGDAAVAERIYNLSQEIIDMQHTTSSVTEVVQRLNKDFIRSGMSEELRAYLDDVADHLTRDNTRVSEYRESLSQILNVNATLVAQRQNEDMKKISGWAAIIFAPTLVSSIYGMNFDIMPELHWAFGYPLALLAMLGFTLLLYWIFKRSKWM

SEQ ID NO: 249 - DNA, 780 bp, Corynebacterium glutamicum
  CDS (101)..(757): RXA02441
ccggcgaccagggcgcgggagatgaatgaaacgtcaaaaggcactatgagggcgtcagtaaaaaacttcatttgaaaatgataaccgttatcattaaggaatggcagaactcagcgtccggaatctcacatgcacatacggcaatcacatcgcgctcaacaacatcacggcacgcttcccaaccggaaaaataactgccctcatcggcagcaacggctccggaaaatccacactgttggaaactttggcgggcatgctggcaccccgcagcggaagcattaacaaccttgtgccagaaatcgcgttcgtcccccaacgcagccacgtctcccataatttgcccatcacgatcagacaaacagtcagcatggggcgatggtcagccaagaaaaactggcaacgactcactgccgcagattgcaacatcgtggacagctgcctcgaccggctcgaaatctccggcctcgccgaccgccccctcggcgaagtatcaggcgggcagcgccaacgcgccctcatagcgcaaggtttagcgcaacaggcgcccttattgcttctcgacgaacccctcgccgccgtggactcccacgcggcaagtcttatcgaagatgtcattaaccaacaacgcaaccaaggaaccacaattattcttgcgactcacgatcttgatcaagcacatcaagcagatcagattatcgccttggaaaaaggaatcataaagccacagcgcaaagccactgaatcaataaagaagcgttaataaagtttgacttgtgcctc

SEQ ID NO: 250 - protein, 219 aa, Corynebacterium glutamicum
MAELSVRNLTCTYGNHIALNNITARFPTGKITALIGSNGSGKSTLLETLAGMLAPRSGSINNLVPEIAFVPQRSHVSHNLPITIRQTVSMGRWSAKKNWQRLTAADCNIVDSCLDRLEISGLADRPLGEVSGGQRQRALIAQGLAQQAPLLLLDEPLAAVDSHAASLIEDVINQQRNQGTTIILATHDLDQAHQADQIIALEKGIIKPQRKATESIKKR

SEQ ID NO: 251 - DNA, 972 bp, Corynebacterium glutamicum
  CDS (101)..(949): RXN02442
gccgtgatgttgttgagcgcgatgtgattgccgtatgtgcatgtgagattccggacgctgagttctgccattccttaatgataacggttatcattttcaaatgaagttttttactgacgccctcatagtgccttttgacgtttcattcatctcccgcgccctggtcgccggatgcctggccgcaattttatgctcactcattggaacgtgggttattttgcgcaggctaacctttttcggcgacgctatgtcgcacggcttgctccccggagtagccacggcatcactattgggcggaaatctcatgttcggcgcagcaatcagcgcattaatcatgtcagccggagtggtgtggaccagcagaaaatccagcctctcccaagacgtcagcattggcctgcaatttattaccatgctttccctcggcgtggttattgtgtcccactccgattcccacgccgtagacctcaccagtttcctttttggagacattcttggcgtgcgaccctcggatatattcatcatcgccattgcaacagtgttgggtggattgactatttttctcttccaccgacagttcactgcactcgctttcgacgagcgtaaagctcacaccttaggactcaatccccgctttgcacacctactcatgctggcactgatcgcattagctacggtggtgtcgtttcaggtggtgggaacgcttttagtgtttggacttctcattggtccgcccgccacggctgcacttttagtgcaagacaaagcaagtatttcactgatcatgatcgtcgcgtcgcttcttggatgcgcggaaatttacctcgggcttttaatcagctggcacgcaagcactgccgcgggagccactatcactttgttaagtgctgcgatattttttgccaccttattgacaaagagtgccattagtaggttaaacttcaccgcgtgatactgaaagacattttcaat

SEQ ID NO: 252 - protein, 283 aa, Corynebacterium glutamicum
MKFFTDALIVPFDVSFISRALVAGCLAAILCSLIGTWVILRRLTFFGDAMSHGLLPGVATASLLGGNLMFGAAISALIMSAGVVWTSRKSSLSQDVSIGLQFITMLSLGVVIVSHSDSHAVDLTSFLFGDILGVRPSDIFIIAIATVLGGLTIFLFHRQFTALAFDERKAHTLGLNPRFAHLLMLALIALATVVSFQVVGTLLVFGLLIGPPATAALLVQDKASISLIMIVASLLGCAEIYLGLLISWHASTAAGATITLLSAAIFFATLLTKSAISRLNFTA

SEQ ID NO: 253 - DNA, 972 bp, Corynebacterium glutamicum; identical to SEQ ID NO: 251
  CDS (101)..(949): FRXA02442

SEQ ID NO: 254 - protein, 283 aa, Corynebacterium glutamicum; identical to SEQ ID NO: 252

SEQ ID NO: 255 - DNA, 1431 bp, Corynebacterium glutamicum
  CDS (101)..(1408): RXA01756
gcttcaaacaggatttaatctaaaatcttaaacctcgtattttccctgataggctcagatgcgcctgaaatcgggcttgttgaggggagaggtgtgtgacatgaaagagttggaactgggcgaggcgagggacgtcgctgcaacgttggaagcgatgccgatccaggaggttattgatcaggttgagcgaacttctataactaaaggtgcggtactgctgcgtctgctcagtaaagatcgatcgttgttggtcttcgatgctcttggtccgcgactccaggctgatctcattggtgcttttcaggatgcggaagtgctggattatttcgctgaccttgaccctgatgaccgcgtttcactgcttgatgagctgccggcgtcgatcgctgacgagttgcttcgcagtctcgatccgcaggaaaagcaggtcacggagctggtcttgggttacgcaaaggggtcggttggacgttggatgtcgccccaggttttattgcttttcgacgacatgtccgtcgccgaagtcttagattttgtgcgcaatcatgctgctgaggctgagacgatttatgccttacctattgtgaaccgtgctcgccaagtgatgggcgtggtgtcgttgcgaaagctgttcatcgcagatcccactctaaaagtctcggaaatcatggtgcgtcctgtttcggtgttggcgtccgcggatattgaagaaaccgcccgctggttcctacagttggacctcgttgcgatgcccgttgtggatgaatcgaacatgctcttaggagtgctgaccttcgatgatgcgcaagacatcgtggagcaagccgactctgaggactccgctcgcagtggtggttcggaacctctccagcagccgtatctatccacgccgattcggaaactggtgaagtcccgcatcgtatggcttctggttttggcagtgtcagcaattttgacggttcaagttcttgatattttcgaagccaccttggttgaagccgtggtactggcattgttcattcctttgctcactggtactggcggaaacaccggaaaccaagctgcaacaaccgtgacccgtgcgctcgcattgggtgacgtccgaaaatcagatgtcttccgcgtcttgggcagagaaatccgagtcggcctcatgctcggggcattgttgggtgccgttggatttgtgatcgcatcgcttgtttacggcatgcccgtaggcactgtcatcggtctgacattgttggcggtgtgcacgatggccgcatcagttggcggagtaatgccaattattgccaaggcgatcggagcggacccagcggtgttctctaatccttttatttcaaccttctgtgatgcaacaggtttgatcatctactttgcaattgccaagttggtgctcggaatctaaaagatttttgcttttcgacg

SEQ ID NO: 256 - protein, 436 aa, Corynebacterium glutamicum
MKELELGEARDVAATLEAMPIQEVIDQVERTSITKGAVLLRLLSKDRSLLVFDALGPRLQADLIGAFQDAEVLDYFADLDPDDRVSLLDELPASIADELLRSLDPQEKQVTELVLGYAKGSVGRWMSPQVLLLFDDMSVAEVLDFVRNHAAEAETIYALPIVNRARQVMGVVSLRKLFIADPTLKVSEIMVRPVSVLASADIEETARWFLQLDLVAMPVVDESNMLLGVLTFDDAQDIVEQADSEDSARSGGSEPLQQPYLSTPIRKLVKSRIVWLLVLAVSAILTVQVLDIFEATLVEAVVLALFIPLLTGTGGNTGNQAATTVTRALALGDVRKSDVFRVLGREIRVGLMLGALLGAVGFVIASLVYGMPVGTVIGLTLLAVCTMAASVGGVMPIIAKAIGADPAVFSNPFISTFCDATGLIIYFAIAKLVLGI

SEQ ID NO: 257 - DNA, 1142 bp, Corynebacterium glutamicum
  CDS (1)..(1119): RXA02068
atttttgtccccatgttgcgtatcgctgccattgaaccgaaagacattactttggttaccggttctgtatcacttcgaacctttcgcgtgcgcaccggtgaattgcaggtcatgggcgatattgtgggtgcaaaagtacataccgatgatccagagctgcaacaattccacggtcgcgcggtagaaatcgccgatgtggagctggagttatcgcgcactcgcgattggatcatcacgcgcgtggcggtgctgggtgagcgccctaaatttggccggcgcccagtgctgcacacagtgccgtggagtcatatccacggcatcaccgcaggtggtgtcggcgagtccaatcacaccgccgaactcatcgcagggtttgaggatatgaggcctgcggacgtcgcaaagcagctttatcagctgcctacggctcagcgtaccgaagtgacggaagagcttgacgacgaaaagctggcggatatcctgcaggaattgtccgaggaccgccaagccgagttgattgaagaattagacatcgaacgtgccgcggacattctggaggaaatggatccagatgatgctgcagacttgttgggtgagctgcctgatgacaaagctgatgtgttgttggatctgatggaccctgaggaatctgcgccggtgcgtcgtttgatggatttctccccggacaccgttggtgcgctgatgactcctgagccattaattatggatccttccaccacagtcgctgaagcgttggcgatggccagaaaccccgaccttcctacttctttggcatcgttgatctttgtggtgcgcccacccacggccacgcctactggaaaatacctcggctgcgtgcatctgcagaaactgcttcgggagcctccatcaagtttgattggtggcatcctcgaccccgatctgccaccgctctacgctgatgattctcaagaaaccgcagctcgattctttgccacctacaacttggtgtgcggccccgtcttggatgaaaaccgccatctgcttggtgccgtagctgtcgatgacttgctcgaccacatgctgccagaagactggcgcgacgccggaatccgaccaggaaaggagcacacccatggctgatttcaaccgctctgaattag

SEQ ID NO: 258 - protein, 373 aa, Corynebacterium glutamicum
IFVPMLRIAAIEPKDITLVTGSVSLRTFRVRTGELQVMGDIVGAKVHTDDPELQQFHGRAVEIADVELELSRTRDWIITRVAVLGERPKFGRRPVLHTVPWSHIHGITAGGVGESNHTAELIAGFEDMRPADVAKQLYQLPTAQRTEVTEELDDEKLADILQELSEDRQAELIEELDIERAADILEEMDPDDAADLLGELPDDKADVLLDLMDPEESAPVRRLMDFSPDTVGALMTPEPLIMDPSTTVAEALAMARNPDLPTSLASLIFVVRPPTATPTGKYLGCVHLQKLLREPPSSLIGGILDPDLPPLYADDSQETAARFFATYNLVCGPVLDENRHLLGAVAVDDLLDHMLPEDWRDAGIRPGKEHTHG

SEQ ID NO: 259 - DNA, 538 bp, Corynebacterium glutamicum
  CDS (101)..(538): RXA00665
accaaacacttctgtgcgtgacacgcgccaccttatactcccacaagcaacacagaacactcgggatctcaaagtttcgagaaacacagaaagggcagcaatgagcagctcaacacttctcctggcttcaggacaagtcacggcattagccgctgactacacgctcagccacaccccctcagatggcatcctggtagtccttggcttcgccatgatcctcaccttcatgaccctgatcatgctgggtcgactcaccccaatggtggccatgctgttggtccccaccatcttcggtctcatcgccggcgcaggactcggccttggtgacatggcgcttgacgccatcaaggacatggcgcctaccgcggcactcctgatgttcgcgattatgttcttcggaatcatgatcgacgtcggactcttcgaccccctgatccgcgtgatcacccgcgttcttcacgatgaccccgcaaaggtcgtcatcggcaccgcagtacttgcaggtgttgtctccctcgacggcgacggctccaccacc

SEQ ID NO: 260 - protein, 146 aa, Corynebacterium glutamicum
MSSSTLLLASGQVTALAADYTLSHTPSDGILVVLGFAMILTFMTLIMLGRLTPMVAMLLVPTIFGLIAGAGLGLGDMALDAIKDMAPTAALLMFAIMFFGIMIDVGLFDPLIRVITRVLHDDPAKVVIGTAVLAGVVSLDGDGSTT

SEQ ID NO: 261 - DNA, 281 bp, Corynebacterium glutamicum
  CDS (1)..(258): RXA02808
ttttacttcggcatcctcccagtccttgcagaaagtgcttcccacttcggcatcgagcctgtggaaatggcccgcgcatccatcactggccagcccgttcacatgcaaagcccgctggtcccagcgatcctcctgctggtttccctcgccaacgtcaaccttggcgaccaccacaagaaggttctgtggcgcgcctgcatcgtgtccatcgcgatgctcgccgtagccctcttcatcggcgtcgtgccactcagcgcataaaatagcttttcgacgccaaa

SEQ ID NO: 262 - protein, 86 aa, Corynebacterium glutamicum
FYFGILPVLAESASHFGIEPVEMARASITGQPVHMQSPLVPAILLLVSLANVNLGDHHKKVLWRACIVSIAMLAVALFIGVVPLSA

SEQ ID NO: 263 - DNA, 960 bp, Corynebacterium glutamicum
  CDS (101)..(937): RXN00444
tacccaatggcattgaccaccaccggtgaagacaacgaggtagcgaaggctttcgcagagttcctcagcagcgatcgtgccaaggagatccttgccagctatggttttggcacaaactaaaaaggctcgtcgaagcgagaatcatatcctcccagggtggttgctcatcccagccaccctggccatgctgctgatcattggacctatttttgctttgctgttgcagatcccctgggatcggtcttgggagttgcttaccgcgccggaatctttaggaaccgcacggttatctatcggaactgctctgttttctaccgcgctatgcgcaattgtgggtttcccgctagcgttggcgctgcatttatatgagcgttcgcaccccagggtgacatcagttttgacggtgctggtttatgcgcctttggtgttgtcgccggtggtgtctggtttggcgctgacttttctgtggggcaggcgtggttttttaggttcttggcttgatcaggttggattgccgattgcatttaccaccacggctgtggtgtttgcccaggtgtttgtagcgttgccatttttcatttccactgtgactactgcactgcgtggcattccaaaacagtttgaggaaatcgcagctactgaaggcgcaacccgctgggagatcatgcacaagatgatcattccgctggcgatgcctggaattttcaccggtatgattttgggattcgccagggccttgggcgagtatggtgcgacactgacttttgctggaaatattgcaggtgttacccgcaccattccgttgcatattgagcttggtttgagttccaatgacatggataaagccttgggagcggtgattatgcttttggctgtctatgtcctcatcattggagccatcggagcgttacgattgttttccaaggtgagaaaggtttaattgatgtctcgttcgccgga

SEQ ID NO: 264 - protein, 279 aa, Corynebacterium glutamicum
MVLAQTKKARRSENHILPGWLLIPATLAMLLIIGPIFALLLQIPWDRSWELLTAPESLGTARLSIGTALFSTALCAIVGFPLALALHLYERSHPRVTSVLTVLVYAPLVLSPVVSGLALTFLWGRRGFLGSWLDQVGLPIAFTTTAVVFAQVFVALPFFISTVTTALRGIPKQFEEIAATEGATRWEIMHKMIIPLAMPGIFTGMILGFARALGEYGATLTFAGNIAGVTRTIPLHIELGLSSNDMDKALGAVIMLLAVYVLIIGAIGALRLFSKVRKV

SEQ ID NO: 265 - DNA, 900 bp, Corynebacterium glutamicum
  CDS (101)..(877): FRXA00444
  misc_feature 28, 29, 30, 31, 32, 33, 34, 35, 37, 38, 39, 41: n = a, c, t, or g
gatcgtgccaaggagatccttgccagcnnnnnnnntnnnantggttttggcacaaactaaaaaggctcgtcgaagcgagaatcatatcctcccagggtggttgctcatcccagccaccctggccatgctgctgatcattggacctatttttgctttgctgttgcagatcccctgggatcggtcttgggagttgcttaccgcgccggaatctttaggaaccgcacggttatctatcggaactgctctgttttctaccgcgctatgcgcaattgtgggtttcccgctagcgttggcgctgcatttatatgagcgttcgcaccccagggtgacatcagttttgacggtgctggtttatgcgcctttggtgttgtcgccggtggtgtctggtttggcgctgacttttctgtggggcaggcgtggttttttaggttcttggcttgatcaggttggattgccgattgcatttaccaccacggctgtggtgtttgcccaggtgtttgtagcgttgccatttttcatttccactgtgactactgcactgcgtggcattccaaaacagtttgaggaaatcgcagctactgaaggcgcaacccgctgggagatcatgcacaagatgatcattccgctggcgatgcctggaattttcaccggtatgattttgggattcgccagggccttgggcgagtatggtgcgacactgacttttgctggaaatattgcaggtgttacccgcaccattccgttgcatattgagcttggtttgagttccaatgacatggataaagccttgggagcggtgattatgcttttggctgtctatgtcctcatcattggagccatcggagcgttacgattgttttccaaggtgagaaaggtttaattgatgtctcgttcgccgga

SEQ ID NO: 266 - protein, 259 aa, Corynebacterium glutamicum
LLIPATLAMLLIIGPIFALLLQIPWDRSWELLTAPESLGTARLSIGTALFSTALCAIVGFPLALALHLYERSHPRVTSVLTVLVYAPLVLSPVVSGLALTFLWGRRGFLGSWLDQVGLPIAFTTTAVVFAQVFVALPFFISTVTTALRGIPKQFEEIAATEGATRWEIMHKMIIPLAMPGIFTGMILGFARALGEYGATLTFAGNIAGVTRTIPLHIELGLSSNDMDKALGAVIMLLAVYVLIIGAIGALRLFSKVRKV

SEQ ID NO: 267 - DNA, 852 bp, Corynebacterium glutamicum
  CDS (101)..(829): RXN02614
tcattgtatacgccaccctcggtctgctgtctgaagcgctgatcagagcttgggaacgtcacaccttccgctaccgaaacgcataagaaagttgctcgccatgactgccacattgtcactcaaacccgcagccactgtccgtggattgcgcaaatcatacggaactaaagaagtcctccaaggaatcgacctcaccatcaactgcggcgaagtaaccgcgctgatcggacgctcaggttcaggaaaatccaccatcctgcgcgtgttggcgggcctatctaaagagcattccggctctgtagaaatttccggaaacccggccgttgccttccaagagcctcgcctgttgccgtggaaaacggtgctcgataatgtgacctttggcctcaaccgcactgatatttcctggtcagaagcacaagaacgcgcctcggcactgcttgcagaagtcaaacttcccgactccgacgccgcctggcccctcacgctctccggcggccaagcccagcgcgtctcccttgcgcgagcgctcatctccgagccagagcttttgcttctcgacgaacccttcggcgccctcgatgctctgacaagactgacagcccaagacctgctgctcaaaaccgtgaacacccgaaacttgggagttctgctggtcacccatgatgtttccgaggccatcgccctggccgaccacgtccttcttcttgacgacggcgccatcacacacagtttgactgtagatatccccggcgatcgccgcacccacccctcctttgcctcctacaccgctcaactccttgagtggctcgaaatcaccacacctgcctagaaagaaatcatgaaatttaa

SEQ ID NO: 268 - protein, 243 aa, Corynebacterium glutamicum
MTATLSLKPAATVRGLRKSYGTKEVLQGIDLTINCGEVTALIGRSGSGKSTILRVLAGLSKEHSGSVEISGNPAVAFQEPRLLPWKTVLDNVTFGLNRTDISWSEAQERASALLAEVKLPDSDAAWPLTLSGGQAQRVSLARALISEPELLLLDEPFGALDALTRLTAQDLLLKTVNTRNLGVLLVTHDVSEAIALADHVLLLDDGAITHSLTVDIPGDRRTHPSFASYTAQLLEWLEITTPA

SEQ ID NO: 269 - DNA, 852 bp, Corynebacterium glutamicum; identical to SEQ ID NO: 267
  CDS (101)..(829): FRXA02614

SEQ ID NO: 270 - protein, 243 aa, Corynebacterium glutamicum; identical to SEQ ID NO: 268

SEQ ID NO: 271 - DNA, 621 bp, Corynebacterium glutamicum
  CDS (101)..(598): RXN01142
ctccccatccaccggcacagtcagcgcaggcaacgaagaaattaaaggaccaggacctgaccgaggcatggttttccaagaccacgccctcctgccctgattgaccgcacgcggcaacatcgacttcgggctccgctccgcgcgcccctccttgagcaaaaccgaacgcgccgacatcacccgcacccacctcgaacaagtaggcctcaccgacgccgccgaacggcgccccgcccgcctctccggcggcatgcaacagcgagtcggcatcgcacgcgccttcgccatcgacccaccaatcatgcttctcgacgaacccttcggcgccctcgacgccctcacccgccgcgaactccagctccaactactcaacatttgggaagcctcccgccgcaccgtcgtcatggtcacccacgacgtcgacgaggccatcctgctctccgaccgagttctcgtgatgtccaagagccccgaagccaccatcatcaccgatattccagtgaatcttccccgccccagacacgagctgagtgaagacgcttctgttgaagccgagaccacagccctgcgtaagcggatgctgcatctgctggagcactagtttctaacacgtcttttaaa

SEQ ID NO: 272 - protein, 166 aa, Corynebacterium glutamicum
LTARGNIDFGLRSARPSLSKTERADITRTHLEQVGLTDAAERRPARLSGGMQQRVGIARAFAIDPPIMLLDEPFGALDALTRRELQLQLLNIWEASRRTVVMVTHDVDEAILLSDRVLVMSKSPEATIITDIPVNLPRPRHELSEDASVEAETTALRKRMLHLLEH

SEQ ID NO: 273 - DNA, 443 bp, Corynebacterium glutamicum
  CDS (1)..(420): FRXA01142
acccgcacccacctcgaacaagtaggcctcaccgacgccgccgaacggcgccccgcccgcctctccggcggcatgcaacagcgagtcggcatcgcacgcgccttcgccatcgacccaccaatcatgcttctcgacgaacccttcggagccctcgacgccctcacccgccgcgaactccagctccaactactcaacatttgggaagcctcccgccgcaccgtcgtcatggtcacccacgacgtcgacgaggccatcctgctctccgaccgagttctcgtgatgtccaagagccccgaagccaccatcatcaccgatattccagtgaatcttccccgccccagacacgagctgagtgaagacgcttctgttgaagccgagaccacagccctgcgtaagcggatgctgcatctgctggagcactagtttctaacacgtcttttaaa

SEQ ID NO: 274 - protein, 140 aa, Corynebacterium glutamicum
TRTHLEQVGLTDAAERRPARLSGGMQQRVGIARAFAIDPPIMLLDEPFGALDALTRRELQLQLLNIWEASRRTVVMVTHDVDEAILLSDRVLVMSKSPEATIITDIPVNLPRPRHELSEDASVEAETTALRKRMLHLLEH

SEQ ID NO: 275 - DNA, 948 bp, Corynebacterium glutamicum
  CDS (101)..(925): RXN01141
aaagaacactcggtatggcacctgatttaaggatgctgcaatcgtgacacatatcctcttcgacagcaggcgttttctgcaactgggcgcttttgcgtccttgagcaccgcattggccggagcggcccgctacgtgacgtcgacaagcaataatgaacctgcggataacactcccctgaccattggctacgtgcctattgcgggctcggcgccgattgctatcgcagatgcgctagggctgtttaagaaacacggcgtgaatgtcacgttgaagaagtactcaggctggtccgacctgtggaccgcctatgcaacagagcagcttgatgttgcgcacatgctgtcgccgatgactgtggcgattaatgctggagtgaccaacgcgtcgcgcccgacggagctgtcgtttacccagaacaccaatgggcaagcaattaccttggcgtcaaagcactatggttccgtcaattcagcggcggatcttaaaggcatggtgctgggaattccttttgaatattcagtccatgcgctgctcctgcgcgattatctcgtctcaaacgcagttgatcccatcgccgatcttgagcttcgcctgctccgacctgccgatatggtcgcacaattgacagttgagggcatcgatggattcattgggcctgggccgtttaatgaacgcgccatcagcaatggctccggccggatttggctgctgaccaaacaactgtgggacaaacatccatgctgcgccgtggcgatggccaaagagtggaaagctgaacaccccacggcggctcagggtgtgcttaatgcgctggaggaagcctccgcaattttgagcaatccggcacaatttgattcctcggcacgcacgctgtcgcaggaaaaatacctcaaccagcctgccacgttgctggatggaccgtcgtaatcatcggcatcaccggctta

SEQ ID NO: 276 - protein, 275 aa, Corynebacterium glutamicum
LSTALAGAARYVTSTSNNEPADNTPLTIGYVPIAGSAPIAIADALGLFKKHGVNVTLKKYSGWSDLWTAYATEQLDVAHMLSPMTVAINAGVTNASRPTELSFTQNTNGQAITLASKHYGSVNSAADLKGMVLGIPFEYSVHALLLRDYLVSNAVDPIADLELRLLRPADMVAQLTVEGIDGFIGPGPFNERAISNGSGRIWLLTKQLWDKHPCCAVAMAKEWKAEHPTAAQGVLNALEEASAILSNPAQFDSSARTLSQEKYLNQPATLLDGPS

SEQ ID NO: 277 - DNA, 424 bp, Corynebacterium glutamicum
  CDS (101)..(424): FRXA01135
catttactaatctcacaagacatcgcctaatgaatacagactagcctattcaaattcaaagaacactcggtatggcacctgatttaaggatgctgcaatcgtgacacatatcctcttcgacagcaggcgttttctgcaactgggcgcttttgcgtccttgagcaccgcattggccggagcggcccgctacgtgacgtcgacaagcaataatgaacctgcggataacactcccctgaccattggctacgtgcctattgcgggctcggcgccgattgctatcgcagatgcgctagggctgtttaagaaacacggcgtgaatgtcacgttgaagaagtactcaggctggtccgacctgtggaccgcctatgcaacagagcagcttgatgttgcgcacatgctgtcgccgatgactgtggcgattaat

SEQ ID NO: 278 - protein, 108 aa, Corynebacterium glutamicum
VTHILFDSRRFLQLGAFASLSTALAGAARYVTSTSNNEPADNTPLTIGYVPIAGSAPIAIADALGLFKKHGVNVTLKKYSGWSDLWTAYATEQLDVAHMLSPMTVAIN

SEQ ID NO: 279 - DNA, 485 bp, Corynebacterium glutamicum
  CDS (1)..(462): FRXA01141
gtcaattcagcggcggatcttaaaggcatggtgctgggaattccttttgaatattcagtccatgcgctgctcctgcgcgattatctcgtctcaaacgcagttgatcccatcgccgatcttgagcttcgcctgctccgacctgccgatatggtcgcacaattgacagttgagggcatcgatggattcattgggcctgggccgtttaatgaacgcgccatcagcaatggctccggccggatttggctgctgaccaaacaactgtgggacaaacatccatgctgcgccgtggcgatggccaaagagtggaaagctgaacaccccacggcggctcagggtgtgcttaatgcgctggaggaagcctccgcaattttgagcaatccggcacaatttgattcctcggcacgcacgctgtcgcaggaaaaatacctcaaccagcctgccacgttgctggatggaccgtcgtaatcatcggcatcaccggctta

SEQ ID NO: 280 - protein, 154 aa, Corynebacterium glutamicum
VNSAADLKGMVLGIPFEYSVHALLLRDYLVSNAVDPIADLELRLLRPADMVAQLTVEGIDGFIGPGPFNERAISNGSGRIWLLTKQLWDKHPCCAVAMAKEWKAEHPTAAQGVLNALEEASAILSNPAQFDSSARTLSQEKYLNQPATLLDGPS

SEQ ID NO: 281 - DNA, 892 bp, Corynebacterium glutamicum
  CDS (101)..(892): RXA00728
gattacttcacagatgtcagatcttaatcaagggcctggagcttcaacggcccaaccgaaaccgattgaagccaagccactacgccaccctggccggtgggtggcagccgctatcatcgtggcactgctcgcatggtttatcatcagcgcgctcaacaatgaggcctacggttgggatacctaccgctcgtatctttttgacacccgcattgccaccgcggcacttcacaccattgcgctgaccttgctgtccatgatcttgggtgtggttctcggcgcaatcttggccgtcatgcgtatgtccggcaaccctgtcatgcagggcgtagcgtggctgtacctgtggattttccgcggcaccccaatttatgtgcagttggtgttctggggcctgctgggttccttgtaccagtcgatcaacctcggtttcgcagagatcgatctgcaaagcttgctgtctaatatgttcctgctcgcggtgatcggtctgggtctcaacgaggctgcgtacatggcggaaatcgtgcgctcgggcatccaagcggtgcctgagggccagatggaggcgtcgaaagctttgggtatgaactggtcaatgaccatgcgtcgcaccatcttgccgcaggccatgcgcatcatcattccgccaaccggcaatgaactgatctccatgctcaagaccacctctctggttgttgcgattccttattctctcgagctgtacggccgcagcatggatattgcgtactccctcttcgagccagttccaatgcttctggttgctgcgagctggtacttggtcatcacctctattcttatggttggtcagtactacctggagaagcacttcgaaaagggcagcacccgcaccctgaccgcacgtcagctcgct

SEQ ID NO: 282 - protein, 264 aa, Corynebacterium glutamicum
VAAAIIVALLAWFIISALNNEAYGWDTYRSYLFDTRIATAALHTIALTLLSMILGVVLGAILAVMRMSGNPVMQGVAWLYLWIFRGTPIYVQLVFWGLLGSLYQSINLGFAEIDLQSLLSNMFLLAVIGLGLNEAAYMAEIVRSGIQAVPEGQMEASKALGMNWSMTMRRTILPQAMRIIIPPTGNELISMLKTTSLVVAIPYSLELYGRSMDIAYSLFEPVPMLLVAASWYLVITSILMVGQYYLEKHFEKGSTRTLTARQLA

SEQ ID NO: 283 - DNA, 1518 bp, Corynebacterium glutamicum
  CDS (101)..(1495): RXA02663
gtgcaaatatctgtccagttcgtgagactacgtcaatgcttccaaggtcattggcgcatcaaccgctcacatcttgatcaagcacgttgcccgaaactgcatggctccgattctggtgttcgccaccgtcctggtcgccgatgcgattgtcttcgaagcatccctgtccttcatcaacgctggtgtgaaaccaccatcaccttcatggggcaacatccttgccgatggtaaagccctgctgcttagcggcgcatggtggccaaccttcttcccaggtttgatgatcctgctgaccgttctctgcttgaacatcctttctgaaggcctcaccgacaccctggccagccctaagccaaagcctgtttcagcttctgcaaagaaggcactgaagaaggaagaatccggtgaaaaggaaggctccggaatcgtgcttgggcacaccacacgtgaagaagccaacgcctcactgctcgcatcacttgctgcgctatccaccagcgaaaacaattccaataaccggcttatatttgatggcaaccccactcctctgttggaagttcgcgatctaaagatctccttccccaatgctcacggagatatcaatattgtcgacggcgtgaacttcaccgtcgccccaggccaaaccatgggtcttgtcggtgaatccggctgtggtaaatcgattaccgcaatgtcgatcatgggtctgctgcctccaacagcaaagatcgaaggcgagatccttttcgacggaaagaacctccttgatctgaaaccagacgagctcaatgcactgcgtggacatgaaatcgccatgatctaccaagatgcactctcctcactcaacccatccatgctgatcagcgcccaaatgaagcagctgacccgccgcggtggaaagcgcagtgccgaagaactcctggaacttgtaggccttgatccaaagcgcaccctgcagtcctacccgcatgagctttcaggtggccagcgccagcgagttctcatcgcaatggcactgaccagaaacccacgcctcctcatcgccgacgagccaaccaccgcgctagacgtcactgttcagcagcaggttgtcgatctgcttaatgaactgcgtgaaaagctcggattcgccatgatctttgtatcccacgacttggctcttgtcgcccgcctggtgcacaagctcaccgtcatgtacgcaggtcaggttgttgagcaaggaaccacccgcgaaatccttatcgatcctcgacacgaatacacccgcggtttgctcggatccgtgctctccatcgaagctggtgtggaccgcctctaccaggtcccaggcactgttccatcaccaaaggaattcgtggcaggcgaccgctttgcaccacgatcagaattcccagaacttggccttgaccaaaagccagtacttcgccccatcacgggcacagagcatgcatacgcagcaaccgatgaacttcttgccgcaaagggagaacaacgatgacctcgacaatcgacaccagg

SEQ ID NO: 284 - protein, 465 aa, Corynebacterium glutamicum
MAPILVFATVLVADAIVFEASLSFINAGVKPPSPSWGNILADGKALLLSGAWWPTFFPGLMILLTVLCLNILSEGLTDTLASPKPKPVSASAKKALKKEESGEKEGSGIVLGHTTREEANASLLASLAALSTSENNSNNRLIFDGNPTPLLEVRDLKISFPNAHGDINIVDGVNFTVAPGQTMGLVGESGCGKSITAMSIMGLLPPTAKIEGEILFDGKNLLDLKPDELNALRGHEIAMIYQDALSSLNPSMLISAQMKQLTRRGGKRSAEELLELVGLDPKRTLQSYPHELSGGQRQRVLIAMALTRNPRLLIADEPTTALDVTVQQQVVDLLNELREKLGFAMIFVSHDLALVARLVHKLTVMYAGQVVEQGTTREILIDPRHEYTRGLLGSVLSIEAGVDRLYQVPGTVPSPKEFVAGDRFAPRSEFPELGLDQKPVLRPITGTEHAYAATDELLAAKGEQR

SEQ ID NO: 285 - DNA, 783 bp, Corynebacterium glutamicum
  CDS (101)..(760): RXA02664
atccacaaagacccgtaccggaaagctgtttcgcccagaccaggtccacgccaacaaaaacatcaacttcaaggcctaccgcgatgaagtaatcggcatcgtgggtgaatctggttgcggaaaatctacccttgcccgcgttatggttggcctgcaaccggtcacctccggcgaagtgctgttcaaaggcaagcccatgaagcctcgtggtgcgcagcgcaaagaactcggcagctcagtatccgtcgtgttccaggatcctgccacctcgttaaacccacgaatgaccgtgcgcgaacagctcctcgatccacttcgagtacacaaagttggcgatgaagcatcccgcaaccagtgggtttcagagctgatctccatggttggcctcccgcaatccgcgttggaagtactcccccgacaggtttccggtggccaacgccaacgcgtggccattgctcgagcacttgcgctgaaacctgacatcatcgttgccgacgaaccaacctccgcgctggatgtatccgttcgtgcgcaggtcctcaaccttctgctggatctgaaaactgaactcggcctgggattggtattcatctcccacgacatcaacactgttcgctacgtttctgatcgcatcgcagtcatgctggctggagaaatcattgaggaaaacaccacctcagagatcttcaacaatgcgcagcaggactacacccgcactctgctcgaagcgacaccatcgctgctgaacaaaactcgtttgtagtctccaaccctttattccct

SEQ ID NO: 286 - protein, 220 aa, Corynebacterium glutamicum
VGESGCGKSTLARVMVGLQPVTSGEVLFKGKPMKPRGAQRKELGSSVSVVFQDPATSLNPRMTVREQLLDPLRVHKVGDEASRNQWVSELISMVGLPQSALEVLPRQVSGGQRQRVAIARALALKPDIIVADEPTSALDVSVRAQVLNLLLDLKTELGLGLVFISHDINTVRYVSDRIAVMLAGEIIEENTTSEIFNNAQQDYTRTLLEATPSLLNKTRL

SEQ ID NO: 287 - DNA, 1155 bp, Corynebacterium glutamicum
  CDS (101)..(1132): RXA00760
accacggttgtctccattgtcactgtgctggtcatcgtctacatcatcgccaaccttctcgtggacttgatctacgccgttctcgatccgaggatccgctatgcctaataatgaattccacacaaaccactcgttgggccaagatgatcaaaccccagatcaggctcatttcttcccacaaggacgaggcgaggctctagttcgaccaggtcaagagcacttcatcgcagccactgatgaaaccggacttggtgccgtcgatgctgttgctgatgactctgcaccaacctccatgtggggcgaagcgtggcgagaccttcgtcgtcgaccactgttctgggtctctgcggtgttgattattttggcgcttctcctggccgcagttccgcagctgtttacctcaacggatccccagttctgtgtgctggcaaactctcttgatggtccacagtctggacatcccttcggattcgaccgtcaaggttgcgatatttttgctcgtaccgtctacggtgctcgtgcctcggtcgccgtcggtgtgttgaccacgttactggtcgccctcatcggtactgtatttggtgctttggctggcttctttggtggcatcatggataccatcctctcccgcatcaccgacatgttcttcgccattccactggttctggcagccatcgttgtgatgcagatgttcaaggaacaccgcaccatcgtcaccgtggttttggtgcttgggcttttcggctggaccaacattgcgcgtattacccgtggagcggtgatgaccgcaaagaatgaagagtatgtcacctccgcacgtgcgcttggtgcatcaaaagccaagatactgctgtctcacatcatgccaaacgccgcagcacccatcattgtgtatgcaactgtggcactgggaacattcatcgtggcagaggcgacgctctccttcctgggcattggccttccaccatcaattgtctcctggggtgctgatatcgcgaaggcacaaacctcccttcgtacccaacccatggtgctgttctaccccgcaatggcacttgcactaaccgttttgagcttcatcatgatgggcgatgtcgtccgcgacgctctggatcctaagtcgaggaagcgatgaccaccaacatcccacaaacc

SEQ ID NO: 288 - protein, 344 aa, Corynebacterium glutamicum
MPNNEFHTNHSLGQDDQTPDQAHFFPQGRGEALVRPGQEHFIAATDETGLGAVDAVADDSAPTSMWGEAWRDLRRRPLFWVSAVLIILALLLAAVPQLFTSTDPQFCVLANSLDGPQSGHPFGFDRQGCDIFARTVYGARASVAVGVLTTLLVALIGTVFGALAGFFGGIMDTILSRITDMFFAIPLVLAAIVVMQMFKEHRTIVTVVLVLGLFGWTNIARITRGAVMTAKNEEYVTSARALGASKAKILLSHIMPNAAAPIIVYATVALGTFIVAEATLSFLGIGLPPSIVSWGADIAKAQTSLRTQPMVLFYPAMALALTVLSFIMMGDVVRDALDPKSRKR

SEQ ID NO: 289 - DNA, 1632 bp, Corynebacterium glutamicum
  CDS (101)..(1609): RXA02035
ggattttccattggcggaggttcatgcggcgggtatccattgccttccattttagttttccatttagtttcccggatcacaccgactaatctcagaagccatgaagatcacgcgcggactcctgccatcattgctgttggcaagcacaatcgtggtgtcgtcatgctctgctggatcgactgcgtatcagcagccccctgctgttgatcaatcatccattgtcattgctaccacggctgctgcggcgtcacttgatttcaccaatgctgcgggcgctgctattccgcaggcgatgatgtccaatatttacgaggggcttgtgcgcatcgatgcggagggtgagattcagccgctgcttgccacgtcgtgggatatttcagacgatcgcaccgagtacattttccatttgcgggagggtgtgctgttttccaacggcgatcccttcaatgctgattctgcgaagttttccattgatcgggtaaaaactgactggaccaatggtttgaaaagtggcatggatgtggtggagtccaccgaggtgattgacgatcacacgctgaaagtttcgctggtcaggccgtccaaccaatggttgtggagcatgggtaccgcgatcggtgccatgatgacggaggggggcgtcgataagctggcaactgatcccgttggcaccggcccgtacacggtgacgcactgggcgccgggccgcgcaattgggttcggcgcgcgggccgattattgggggcagaagccgcttaacgacgccgcaaccatccgctacttcagcgatgcgacggcctcgaccaatgcgctgcaaagcggtgacgtggacgtgatttgggcgatgcaagcgcccgaacagctggctacgctgcaggaatacaccgtggaagtgggcacaaccaatggtgagatgttgctgtcgatgaataatcagcgtgcaccttttgatgatgtgcgtgtgcgccaggcggtgatgtttgcgattgatcgccaagccgtcattgataccgcgttggaaggttacggcaccgacactggtggcgtgcctgttccgccgactgatccgtggtacgagaaatccacgatgtacccctacgatccggaccgcgcacgggcattgttagaggaggccggcgccgagggaacgcggatcaccatgtccattccttcgttgccgtacgctcaggcagcctctgaaatcctgtactcgcaactgcgagatgttggttttgatcctgtgattgaatcaaccgagttcccagccgtctggttggcacaggtcatggggcaaaaagactacgacatgtcactaatcgcgcatgtggaaccccgcgacatccccacgctgtttagccccaactactatttgggctttgacgacaccgaaacccaagccctcctcgcagaggcagacagttcagcaaacgaagtggaattgatgcaacaagctgtcgatcgaatcatggaacaagccgtcgccgacaacctcatgaacgtggccaacatcgtggtgatgtcaccagagatcaccggcattgatcccaacgtggtgtccggggcgttggaattgtcgttgattggtcggaaagaatccggggtagcgcagtgagtaaaacaatcgcttggact

SEQ ID NO: 290 - protein, 503 aa, Corynebacterium glutamicum
MKITRGLLPSLLLASTIVVSSCSAGSTAYQQPPAVDQSSIVIATTAAAASLDFTNAAGAAIPQAMMSNIYEGLVRIDAEGEIQPLLATSWDISDDRTEYIFHLREGVLFSNGDPFNADSAKFSIDRVKTDWTNGLKSGMDVVESTEVIDDHTLKVSLVRPSNQWLWSMGTAIGAMMTEGGVDKLATDPVGTGPYTVTHWAPGRAIGFGARADYWGQKPLNDAATIRYFSDATASTNALQSGDVDVIWAMQAPEQLATLQEYTVEVGTTNGEMLLSMNNQRAPFDDVRVRQAVMFAIDRQAVIDTALEGYGTDTGGVPVPPTDPWYEKSTMYPYDPDRARALLEEAGAEGTRITMSIPSLPYAQAASEILYSQLRDVGFDPVIESTEFPAVWLAQVMGQKDYDMSLIAHVEPRDIPTLFSPNYYLGFDDTETQALLAEADSSANEVELMQQAVDRIMEQAVADNLMNVANIVVMSPEITGIDPNVVSGALELSLIGRKESGVAQ

SEQ ID NO: 291 - DNA, 927 bp, Corynebacterium glutamicum
  CDS (101)..(904): RXN01002
gactgctgataccgcacaggatgaaatcactcgttacggcgagatcctgaagaagttctccaactaatttccctgtttccaatactcaaggtgtgcgcatatgaattctgatgcttcggctaccaccaactcctgggctatcaacttcgaccatgtgtcggtgacgtatcccaatgggacgaaagccctcgatgatgtttccctcaccatcaatcccggtgagatggttgccatcgtgggtctgtcaggatcgggtaaatccacgctgattcgcacgatcaacggtcttgtccgcgctacggaaggcaccgtgacggtggggccgcatcagatcaacaccttgaaggggaaagcactgcgtgatgcccgtgggcagatcggcatgattttccaggggttcaacctgtcggaacgcagcagtgtgttccagaatgttttggtgggccgcttcgcgcacacagcgtggtggcgtaacctcctcgggtttcccacggagcacgacaagcagattgcttttcacgcgttggagtccgtgggcattttgcacaaagtgtggacccgagctggtgctttgtcgggtggacagaaacagcgcgttgctattgcgcgcgccttatcgcaagatccgtctgtcatgctggcagatgagcctgtggcaagccttgatccgccaaccgcgcattccgtgatgcgcgatctagaaaacatcaacaacgtggaaggcctcaccgtgttggtgaacttgcacttgattgatttggctcgtcaatacaccacaaggcttgtgggtttgcgtgccggcaagctggtctatgacggtcctatctctgaggccaccgataaagactttgaagctatctatggtcgccccatccaggctaaagacctgctaggtgatcgcgcatgaccacgccttcttctacactt

SEQ ID NO: 292 - protein, 268 aa, Corynebacterium glutamicum
MNSDASATTNSWAINFDHVSVTYPNGTKALDDVSLTINPGEMVAIVGLSGSGKSTLIRTINGLVRATEGTVTVGPHQINTLKGKALRDARGQIGMIFQGFNLSERSSVFQNVLVGRFAHTAWWRNLLGFPTEHDKQIAFHALESVGILHKVWTRAGALSGGQKQRVAIARALSQDPSVMLADEPVASLDPPTAHSVMRDLENINNVEGLTVLVNLHLIDLARQYTTRLVGLRAGKLVYDGPISEATDKDFEAIYGRPIQAKDLLGDRA

SEQ ID NO: 293 - DNA, 440 bp, Corynebacterium glutamicum
  CDS (1)..(417): FRXA01002
cccacggagcacgacaagcagattgcttttcacgcgttggagtccgtgggcattttggacaaagtgtggacccgagctggtgctttgtcgggtggacagaaacagcgcgttgctattgcgcgcgccttatcgcaagatccgtctgtcatgctggcagatgagcctgtggcaagccttgatccgccaaccgcgcattccgtgatgcgcgatctagaaaacatcaacaacgtggaaggcctcaccgtgttggtgaacttgcacttgattgatttggctcgtcaatacaccacaaggcttgtgggtttgcgtgccggcaagctggtctatgacggtcctatctctgaggccaccgataaagactttgaagctatctatggtcgccccatccaggctaaagacctgctaggtgatcgcgcatgaccacgccttcttctacactt

SEQ ID NO: 294 - protein, 139 aa, Corynebacterium glutamicum
PTEHDKQIAFHALESVGILDKVWTRAGALSGGQKQRVAIARALSQDPSVMLADEPVASLDPPTAHSVMRDLENINNVEGLTVLVNLHLIDLARQYTTRLVGLRAGKLVYDGPISEATDKDFEAIYGRPIQAKDLLGDRA

SEQ ID NO: 295 - DNA, 969 bp, Corynebacterium glutamicum
  CDS (101)..(946): RXN01000
ctttctatgcctacgcggatgtttccgtgatcattctggaaatcctcatcgtggtgattgtcattgaagtaatctccaacgcacttcgaaagaggctggtatgagcaccttaacctctcaccgcacagtaccggcccccagctctcccccggcgcgccccaacaaactggcgcgcaatatcgttgcaattgtcgctgcgctgattgtccttatagctaccggcacgctcaagatcgagtggaatgagcttccgcagatgcccgcgcaggtgtggcattacttagagctgatgtttagcgatcccgattggtcgaagtttggccgcgccgtccaggaaatgtggcgttccatcgccatggcgtggttgggtgccattttatgcgtggtggtctctgtccctctgggaatgttggctgcccgcggggtgggaccttattggctgcgtaccgttttacggttcgtgttcgcggtgattcgtgcgttccccgaagtggttatcgcaattattttgctaactgtcaccggcctaactccttttactggtgcgctcgcattgggtatctccggtattggacaacaggcaaagtggacctatgaagccattgagtccactcccaccggcccgtcagaggcagtgcgtgcagcgggtggaactacgccggaggttctgcggtgggcgttgtggccacaggttgcgccatccattgcatcttttgccctgtaccgctttgagatcaacatccgtacctctgcggtattgggcatcgttggtgcaggtggtatcggtagtatgcttgccaattacaccaactacaggcagtgggacaccgtgggcatgctgctcatcgtcgtggttgtcgcaacgatgatcgtcgatctcatctccggcaccatccgccgccgcatcatgaagggggctagtgaccgtgtcgtggcaccaagcaactgacgctccaccaagcatccgca

SEQ ID NO: 296 - protein, 282 aa, Corynebacterium glutamicum
MSTLTSHRTVPAPSSPPARPNKLARNIVAIVAALIVLIATGTLKIEWNELPQMPAQVWHYLELMFSDPDWSKFGRAVQEMWRSIAMAWLGAILCVVVSVPLGMLAARGVGPYWLRTVLRFVFAVIRAFPEVVIAIILLTVTGLTPFTGALALGISGIGQQAKWTYEAIESTPTGPSEAVRAAGGTTPEVLRWALWPQVAPSIASFALYRFEINIRTSAVLGIVGAGGIGSMLANYTNYRQWDTVGMLLIVVVVATMIVDLISGTIRRRIMKGASDRVVAPSN

SEQ ID NO: 297 - DNA, 563 bp, Corynebacterium glutamicum
  CDS (1)..(540): FRXA01000
atgttggctgcccgcggggtgggaccttattggctgcgtaccgttttacggttcgtgttcgcggtgattcgtgcgttccccgaagtggttatcgcaattattttgctaactgtcaccggcctaactccttttactggtgcgctcgcattgggtatctccggtattggacaacaggcaaagtggacctatgaagccattgagtccactcccaccggcccgtcagaggcagtgcgtgcagcgggtggaactacgccggaggttctgcggtgggcgttgtggccacaggttgcgccatccattgcatcttttgccctgtaccgctttgagatcaacatccgtacctctgcggtattgggcatcgttggtgcaggtggtatcggtagtatgcttgccaattacaccaactacaggcagtgggacaccgtgggcatgctgctcatcgtcgtggttgtcgcaacgatgatcgtcgatctcatctccggcaccatccgccgccgcatcatgaagggggctagtgaccgtgtcgtggcaccaagcaactgacgctccaccaagcatccgca

SEQ ID NO: 298 - protein, 180 aa, Corynebacterium glutamicum
MLAARGVGPYWLRTVLRFVFAVIRAFPEVVIAIILLTVTGLTPFTGALALGISGIGQQAKWTYEAIESTPTGPSEAVRAAGGTTPEVLRWALWPQVAPSIASFALYRFEINIRTSAVLGIVGAGGIGSMLANYTNYRQWDTVGMLLIVVVVATMIVDLISGTIRRRIMKGASDRVVAPSN

SEQ ID NO: 299 - DNA, 927 bp, Corynebacterium glutamicum
  CDS (101)..(904): RXA01003
agctggtctatgacggtcctatctctgaggccaccgataaagactttgaagctatctatggtcgccccatccaggctaaagacctgctaggtgatcgcgcatgaccacgccttcttctacacttatcccacaaaagcctcgggctggggtaaagacctatctcatcatcggcgccatcgttgtcttcaccgtggcaacagcaaccccagcgctaggtggcattgagcttgatttcgcttccattgctgcgaattggcgcaatggtgccaacaaactcctgcaaatgctgcagcccaactttgcgttcttgcctcgtacgtggcttcccatgttggaaaccctgcagatggcgcttgttggagctgtcttgtctgctgccgtatcggtgcctttgacgttgtgggcagcgcaggcaaccaacaccagtgcgattggtcgtggcattgtccgcaccatcattaacgtggtgcgctctgtccccgacttggtgtatgccaccatcttggtcgccatggttggtgtcggcgcattacctggcattttgacgctgtttctgttcaacctgggcatcgtggtcaagcttgtctctgaggccattgattccactgagcatccctatatggaagcaggacgcgcagcaggtggatcacagttccaaatcaaccgagtctccgcgcttcctgaagtcatgccgctctttgccaaccaatggctctacaccctagagctgaatgtacgcatctccgccatccttggcatcgtgggcgcaggtggcatcggcaggctgcttgatgaacgccgagctttctatgcctacgcggatgtttccgtgatcattctggaaatcctcatcgtggtgattgtcattgaagtaatctccaacgcacttcgaaagaggctggtatgagcaccttaacctctcaccgc

SEQ ID NO: 300 - protein, 268 aa, Corynebacterium glutamicum
MTTPSSTLIPQKPRAGVKTYLIIGAIVVFTVATATPALGGIELDFASIAANWRNGANKLLQMLQPNFAFLPRTWLPMLETLQMALVGAVLSAAVSVPLTLWAAQATNTSAIGRGIVRTIINVVRSVPDLVYATILVAMVGVGALPGILTLFLFNLGIVVKLVSEAIDSTEHPYMEAGRAAGGSQFQINRVSALPEVMPLFANQWLYTLELNVRISAILGIVGAGGIGRLLDERRAFYAYADVSVIILEILIVVIVIEVISNALRKRLV

SEQ ID NO: 301 - DNA, 594 bp, Corynebacterium glutamicum
  CDS (1)..(594): RXN00193
  misc_feature 11: n = a, c, t, or g
  VARIANT 4: Xaa = Phe, Ser, Tyr, or Cys
aaagctttctnccaacgcgaaggtttcatctcagccttcggtttcaccgtcctcgtggtcatcgtctccgtgatcacagtcaacatcttcgccttcctcttggcgtggttgctgacccgcaaactccgcggtaccaactttttccgcacagtcttctttatgccgaaccttatcggcggcattgtgctgggttatacctggcagaccatgatcaacgccgtgctttcgcactatgccacgactattagcgcggactggaaattcggctacgccggcctcatcatgctacttaactggcagctcatcggctacatgatgatcatttacatcgccggcctgcaaaacgtcccaccagagctcattgaggctgccgaactcgacggcgtcaacaagtgggagatgctgcggcacgtcactattccgatggtcatgccatccatcaccatctgcctctttttgactttgtcgaactcctttaagctcttcgaccagaacctggcgctgaccaacggcgctcctggcgggcaaactgagatggtggcgctcaacatcatcaacacgctgtttaaccgtatgaatgtcgagggcgtcggt

SEQ ID NO: 302 - protein, 198 aa, Corynebacterium glutamicum
  VARIANT 4: Xaa = Phe, Ser, Tyr, or Cys
KAFXQREGFISAFGFTVLVVIVSVITVNIFAFLLAWLLTRKLRGTNFFRTVFFMPNLIGGIVLGYTWQTMINAVLSHYATTISADWKFGYAGLIMLLNWQLIGYMMIIYIAGLQNVPPELIEAAELDGVNKWEMLRHVTIPMVMPSITICLFLTLSNSFKLFDQNLALTNGAPGGQTEMVALNIINTLFNRMNVEGVG

SEQ ID NO: 303 - DNA, 940 bp, Corynebacterium glutamicum
  CDS (75)..(917): FRXA00193
cctcagcctcctctcctcaccgccttccccgctgggaaacgtgtggcaccacctgaaattaaggtttcaccaccatgcaagcaacgctgaagaagtacttcccagtctttgtcttgcccacccttctggcattcatgattgccttcttggtgccgttcatcgtgggtttcttcctctcctttacgaagttcaccactatcaccaacgccaagtgggttggcatagacaactacgtcaaagctttctcccaacgcgaaggtttcatctcagccttcggtttcaccgtcctcgtggtcatcgtctccgtgatcacagtcaacatcttcgccttcctcttggcgtggttgctgacccgcaaactccgcggtaccaactttttccgcacagtcttctttatgccgaaccttatcggcggcattgtgctgggttatacctggcagaccatgatcaacgccgtgctttcgcactatgccacgactattagcgcggactggaaattcggctacgccggcctcatcatgctacttaactggcagctcatcggctacatgatgatcatttacatcgccggcctgcaaaacgtcccaccagagctcattgaggctgccgaactcgacggcgtcaacaagtgggagatgctgcggcacgtcactattccgatggtcatgccatccatcaccatctgcctctttttgactttgtcgaactcctttaagctcttcgaccagaacctggcgctgaccaacggcgctcctggcgggcaaactgagatggtggcgctcaacatcatcaacacgctgtttaaccgtatgaatgtcgagggcgtcggtcaggccaaggccgttatcttcgtcgtcgttgtggtcgtcatcgcgtacttccagctgcgcgcgacccgctccaaggaaatcgaggcttaagttatgactaccagcacttc

SEQ ID NO: 304 - protein, 281 aa, Corynebacterium glutamicum
MQATLKKYFPVFVLPTLLAFMIAFLVPFIVGFFLSFTKFTTITNAKWVGIDNYVKAFSQREGFISAFGFTVLVVIVSVITVNIFAFLLAWLLTRKLRGTNFFRTVFFMPNLIGGIVLGYTWQTMINAVLSHYATTISADWKFGYAGLIMLLNWQLIGYMMIIYIAGLQNVPPELIEAAELDGVNKWEMLRHVTIPMVMPSITICLFLTLSNSFKLFDQNLALTNGAPGGQTEMVALNIINTLFNRMNVEGVGQAKAVIFVVVVVVIAYFQLRATRSKEIEA

SEQ ID NO: 305 - DNA, 1053 bp, Corynebacterium glutamicum
  CDS (101)..(1030): RXN01298
cttaaacgtcaccttatttatgcattatgttggtttcagactcgaacaattcaattagaaaacactaatcggacatttaggtcacataacatttccgctcgtgtccacattaatttctgaacccgaggtggataagctacgtaaacgtgccaagagatcaaggcggacagaatggtggcttgccgccgcacttcttgccccaaacttgcttctcttggccatctttacgtatcggccactgttagataacttccggttgtcctttttcaactggaacatttcctcgcccacatcaaccttcattgggtttgataactacgttgagttcttcactcgtagtgacactctccaagttgttttaaacaccgtcatcttcacggcatgtgctgtgatcggatcgatggtgctcggtttgctcctggccatgttgttggatcagaagcttttcggccgtaactttgtgcgttccatggtgtttgccccgtttgtgatttccggtgctgccattggtgttgctttccagttcgtttttgaccctaattttggtttggttcaggacttgctgggacgcatcggcgttgattcgccacagttctaccaaaaccctaactgggcattgttcatggtgacgttcactttcgtgtggaagaacttgggctactcctttgttatctacctggctgcattgcaggggctaaacaaggatttgtctgaggccgcaccggtggatggcgcgagcgcgtggacacgtttttggaaggttactcttccgcagcttcgcccaaccacgttcttcctttctattactgtcacgctgaactcggttcaggtcttcgacatcattcacaccatgactcgtggtggccccttgggtaacggtacgaccaccttggtttaccaggtgtacaccgagactttcaccaactatcgcgcgggatatggtgcaacaatcgcaacgattttgttcctgttgctgctgattatcactgttatccaggttcgatacatggataaggagaacaagcagaaatgatctcgactgatagaaacgtt

SEQ ID NO: 306 - protein, 310 aa, Corynebacterium glutamicum
VSTLISEPEVDKLRKRAKRSRRTEWWLAAALLAPNLLLLAIFTYRPLLDNFRLSFFNWNISSPTSTFIGFDNYVEFFTRSDTLQVVLNTVIFTACAVIGSMVLGLLLAMLLDQKLFGRNFVRSMVFAPFVISGAAIGVAFQFVFDPNFGLVQDLLGRIGVDSPQFYQNPNWALFMVTFTFVWKNLGYSFVIYLAALQGLNKDLSEAAPVDGASAWTRFWKVTLPQLRPTTFFLSITVTLNSVQVFDIIHTMTRGGPLGNGTTTLVYQVYTETFTNYRAGYGATIATILFLLLLIITVIQVRYMDKENKQK

SEQ ID NO: 307 - DNA, 416 bp, Corynebacterium glutamicum
  CDS (1)..(393): FRXA01298
ttcgtgtggaagaacttgggctactcctttgttatctacctggctgcattgcaggggctaaacaaggatttgtctgaggccgcaccggtggatggcgcgagcgcgtggacacgtttttggaaggttactcttccgcagcttcgcccaaccacgttcttcctttctattactgtcacgctgaactcggttcaggtcttcgacatcattcacaccatgactcgtggtggccccttgggtaacggtacgaccaccttggtttaccaggtgtacaccgagactttcaccaactatcgcgcgggatatggtgcaacaatcgcaacgattttgttcctgttgctgctgattatcactgttatccaggttcgatacatggataaggagaacaagcagaaatgatctcgactgatagaaacgtt

SEQ ID NO: 308 - protein, 131 aa, Corynebacterium glutamicum
FVWKNLGYSFVIYLAALQGLNKDLSEAAPVDGASAWTRFWKVTLPQLRPTTFFLSITVTLNSVQVFDIIHTMTRGGPLGNGTTTLVYQVYTETFTNYRAGYGATIATILFLLLLIITVIQVRYMDKENKQK

SEQ ID NO: 309 - DNA, 535 bp, Corynebacterium glutamicum
  CDS (101)..(535): FRXA02422
cttaaacgtcaccttatttatgcattatgttggtttcagactcgaacaattcaattagaaaacactaatcggacatttaggtcacataacatttccgctcgtgtccacattaatttctgaacccgaggtggataagctacgtaaacgtgccaagagatcaaggcggacagaatggtggcttgccgccgcacttcttgccccaaacttgcttctcttggccatctttacgtatcggccactgttagataacttccggttgtcctttttcaactggaacatttcctcgcccacatcaaccttcattgggtttgataactacgttgagttcttcactcgtagtgacactctccaagttgttttaaacaccgtcatcttcacggcatgtgctgtgatcggatcgatggtgctcggtttgctcctggccatgttgttggatcagaagcttttcggccgtaactttgtgcgttccatggtgtttgccccgtttgtgatttccggtgctgccattggtggtgctttccagttcgtttttgac

SEQ ID NO: 310 - protein, 145 aa, Corynebacterium glutamicum
VSTLISEPEVDKLRKRAKRSRRTEWWLAAALLAPNLLLLAIFTYRPLLDNFRLSFFNWNISSPTSTFIGFDNYVEFFTRSDTLQVVLNTVIFTACAVIGSMVLGLLLAMLLDQKLFGRNFVRSMVFAPFVISGAAIGGAFQFVFD

SEQ ID NO: 311 - DNA, 879 bp, Corynebacterium glutamicum
  CDS (101)..(856): RXN02515
gtggctaagcacagttacttggccaagctgggcggcagaaaaaccggcccagctaatacttcagtttaaaattcgcttcaaccctgaaagattgtgacagatgagcactcttgaaatccgtaacctgcacgcacaggtcctgccgtccgatgagtccgctgagcctaaggaaatcctcaagggcgtcaacctcaccatcaactctggtgagatccacgccatcatgggccctaacggttccggcaagtccactcttgcttacacccttggtggacacccacgctacgaggtaaccgcaggcgaggtcctcctcgacggcgagaacatcctggagatggaagttgatgagcgtgcacgcgctggtctcttcctggccatgcagtatccaactgaaatccctggcgtttccgttgctaacttcctgcgttccgcagcgaccgcaatccgcggcgaggctcctaagcttcgcgagtgggttaaggaagtccgcaccgctcaggaagctctggcaattgaccctgagttctccaaccgctcagtcaacgaaggtttctccggtggcgagaagaagcgccacgaggttctgcagcttgatctgctgaagccaaagttcgcgatcatggatgagaccgactccggccttgacgtggatgcactgcgcattgtttccgagggcatcaactcctacaagcaggagaccgaaggtggcatcttgatgatcacccactacaagcgcatcctcaactacgttaagcctgacttcattcacgttttcgcgaatggccagattgtgaccaccggtggcgctgagcttgctgacaagctcgaggctgacggctacgaccagttcatcaagtaacatgtccgatttcctcaatg

SEQ ID NO: 312 - protein, 252 aa, Corynebacterium glutamicum
MSTLEIRNLHAQVLPSDESAEPKEILKGVNLTINSGEIHAIMGPNGSGKSTLAYTLGGHPRYEVTAGEVLLDGENILEMEVDERARAGLFLAMQYPTEIPGVSVANFLRSAATAIRGEAPKLREWVKEVRTAQEALAIDPEFSNRSVNEGFSGGEKKRHEVLQLDLLKPKFAIMDETDSGLDVDALRIVSEGINSYKQETEGGILMITHYKRILNYVKPDFIHVFANGQIVTTGGAELADKLEADGYDQFIK

SEQ ID NO: 313 - DNA, 879 bp, Corynebacterium glutamicum; identical to SEQ ID NO: 311
  CDS (101)..(856): FRXA02515

SEQ ID NO: 314 - protein, 252 aa, Corynebacterium glutamicum; identical to SEQ ID NO: 312

SEQ ID NO: 315 - DNA, 1461 bp, Corynebacterium glutamicum
  CDS (101)..(1438): RXN01995
ccgacgcaaaggcatgcgcctgcgtgtctcgagtagtctcctccccttcctcgtccccaacctcgaccattacggtcgccctctcctaaaggagcctggcatggatatccgccaaacaattaacgacacagcaatgtcgagatatcagtggttcattgtatttatcgcagtgctgctcaacgcactggacggctttgatgtcctcgccatgtcttttactgcgaatgcagtgaccgaagaatttggactgagtggcagccagcttggtgtgctgctgagttccgcgctgttcggcatgaccgctggatctttgctgttcggtccgatcggtgaccgtttcggccgtaagaatgccctgatgatcgcgctgctgttcaacgtggtgggattggtattgtccgccaccgcgcagtccgcaggccagttgggcgtgtggcgtttgatcactggtatcggcatcggcggaatcctcgcctgcatcacagtggtgatcagtgagttctccaacaacaaaaaccgcggcatggccatgtccatctacgctgctggttacggcatcggcgcgtccttgggcggtttcggcgcagcgcagctcatcccaacatttggatggcgctccgtgttcgcagccggtgcgatcgcaactggtatcgccaccatcgctactttcttcttcctgccagaatccgttgattggctgagcactcgccgccctgcgggcgctcgcgacaagatcaattacattgcgcgccgcctgggcaaagtcggtacctttgagcttccaggcgaacaaagcttgtcgacgaaaaaagccggtctccaatcgtatgcagtgctcgttaacaaagagaaccgtggaaccagcatcaagctgtgggttgcgttcggcatcgtgatgttcggcttctacttcgccaacacttggaccccgaagctgctcgtggaaaccggaatgtcagaacagcagggcatcatcggtggtttgatgttgtccatgggtggagcattcggctccctgctctacggtttcctcaccaccaagttcagctcccgaaacacactgatgaccttcatggtgctgtccggcctgacgctgatcctgttcatttcctccacctctgttccatccatcgcgtttgccagcggcgttgtcgtgggcatgctgatcaatggttgtgtggctggtctgtacaccctgtccccacagctgtactccgctgaagtacgcaccactggtgtgggcgctgcgattggtatgggtcgtgtcggtgcgatttccgcgccactgctggtgggtggcctgctggattctggctggtccccaacgcagctgtatgttggtgtggcagtgattgttattgccggtgcaaccgcattgattgggatgcgcactcaggcggtagccgtcgaaaagcagcctgaagccctagcgaccaaatagggccgcgattcctagcatgc

SEQ ID NO: 316 - protein, 446 aa, Corynebacterium glutamicum
MDIRQTINDTAMSRYQWFIVFIAVLLNALDGFDVLAMSFTANAVTEEFGLSGSQLGVLLSSALFGMTAGSLLFGPIGDRFGRKNALMIALLFNVVGLVLSATAQSAGQLGVWRLITGIGIGGILACITVVISEFSNNKNRGMAMSIYAAGYGIGASLGGFGAAQLIPTFGWRSVFAAGAIATGIATIATFFFLPESVDWLSTRRPAGARDKINYIARRLGKVGTFELPGEQSLSTKKAGLQSYAVLVNKENRGTSIKLWVAFGIVMFGFYFANTWTPKLLVETGMSEQQGIIGGLMLSMGGAFGSLLYGFLTTKFSSRNTLMTFMVLSGLTLILFISSTSVPSIAFASGVVVGMLINGCVAGLYTLSPQLYSAEVRTTGVGAAIGMGRVGAISAPLLVGGLLDSGWSPTQLYVGVAVIVIAGATALIGMRTQAVAVEKQPEALATK

SEQ ID NO: 317 - DNA, 754 bp, Corynebacterium glutamicum
  CDS (101)..(754): FRXA01995
ccgacgcaaaggcatgcgcctgcgtgtctcgagtagtctcctccccttcctcgtccccaacctcgaccattacggtcgccctctcctaaaggagcctggcatggatatccgccaaacaattaacgacacagcaatgtcgagatatcagtggttcattgtatttatcgcagtgctgctcaacgcactggacggctttgatgtcctcgccatgtcttttactgcgaatgcagtgaccgaagaatttggactgagtggcagccagcttggtgtgctgctgagttccgcgctgttcggcatgaccgctggatctttgctgttcggtccgatcggtgaccgtttcggccgtaagaatgccctgatgatcgcgctgctgttcaacgtggtgggattggtattgtccgccaccgcgcagtccgcaggccagttgggcgtgtggcgtttgatcactggtatcggcatcggcggaatcctcgcctgcatcacagtggtgatcagtgagttctccaacaacaaaaaccgcggcatggccatgtccatctacgctgctggttacggcatcggcgcgtccttgggcggtttcggcgcagcgcagctcatcccaacatttggatggcgctccgtgttcgcagccggtgcgatcgcaactggtatcgccaccatcgctactttcttcttcctgccagaatccgttgattggctgagcactcgccgccctgcgggcgctcgcgacaagatcaattacattgcgcgccgc

SEQ ID NO: 318 - protein, 218 aa, Corynebacterium glutamicum
MDIRQTINDTAMSRYQWFIVFIAVLLNALDGFDVLAMSFTANAVTEEFGLSGSQLGVLLSSALFGMTAGSLLFGPIGDRFGRKNALMIALLFNVVGLVLSATAQSAGQLGVWRLITGIGIGGILACITVVISEFSNNKNRGMAMSIYAAGYGIGASLGGFGAAQLIPTFGWRSVFAAGAIATGIATIATFFFLPESVDWLSTRRPAGARDKINYIARR

SEQ ID NO: 319 - DNA, 1227 bp, Corynebacterium glutamicum
  CDS (101)..(1204): RXA01188
aaacagttagaagcacctaaacagtttttccgataactgttgtcattttgtgaccgcctggctttgtagttttccctccggtgtccaagatgaatatgacatgatgaatggcgtggtacagcctcaggaacatctcgatgcaacgttgattgctgcagacttccacggcaaccccgaaaactctggtgaccgcaaagagcgcctgaattttcaaggttggaagtatgcccttaatcgcacggtcagggatgtttttccagatggcctgctcgatttggcggccttgttgacgttcttttccattctgtcgatcgcccctgcagtgctgctgggctattcggtgatcacgatttttctggccagtgactccaccgaaatcctcaaccttgtccgcgatgaggtaaatcagtacgttccggaagatcaatcccatgttgtcaacggcgtgattgattcgatcgcaggctcggcagctgcaggtcaggtcggtgtcgcggtcggtgtgatcacggcattgtggacatcttcggcatatgtgcgcgctttttccagatgtgccaacgctgtttatggccgaagcgaaggccgcacattgatcaaacgctgggcaatgctgcttttcctcaaccttgctttgctgcttggaatcatcatcattttggtctcctgggtgctcaacgagaccttggtgatgggaattttcgcccccatcgcggaaccacttcatctcacgaatgtgctcagcttcctcacggaccggttcatgccgatctggatctgggtgcggttcccagtgattgtgggggtgctcatcatgttcgtggccacgctgtattactgggccccgaacgcccgcccgtggaagtttcgctggctcagcctcggatcattcttggcgatcgttggcatcctgctcgcaggcgtgggcttgaatttctacttcacgctgttcgccgcttttagttcctacggcgcggtgggttcgctgctcgcggtttttattgcgctgtgggtgttcaacatttgcttaatcatcggcctgaaaatcgacgtggagatcagccgcgccaagcaactgcaggcaggaatgccggcggaggattacagtttagtgccaccacgctctatcgagaaggtggcgaaaatgaagcagcgccagcagcgcttgatggatcaggctgcggcgatccgggaggaaagcaattaaaaaattgcttatcgacgtcc

SEQ ID NO: 320 - protein, 368 aa, Corynebacterium glutamicum
MMNGVVQPQEHLDATLIAADFHGNPENSGDRKERLNFQGWKYALNRTVRDVFPDGLLDLAALLTFFSILSIAPAVLLGYSVITIFLASDSTEILNLVRDEVNQYVPEDQSHVVNGVIDSIAGSAAAGQVGVAVGVITALWTSSAYVRAFSRCANAVYGRSEGRTLIKRWAMLLFLNLALLLGIIIILVSWVLNETLVMGIFAPIAEPLHLTNVLSFLTDRFMPIWIWVRFPVIVGVLIMFVATLYYWAPNARPWKFRWLSLGSFLAIVGILLAGVGLNFYFTLFAAFSSYGAVGSLLAVFIALWVFNICLIIGLKIDVEISRAKQLQAGMPAEDYSLVPPRSIEKVAKMKQRQQRLMDQAAAIREESN

SEQ ID NO: 321 - DNA, 717 bp, Corynebacterium glutamicum
  CDS (101)..(694): RXA01972
acgcgttgctggatatcaccctggccgtcgatgacaacgccgaatgcatcgacgccggatgcgccgtacctgggtgtgtcactggacaggagagtgcgtagtggcaaccggtctactgtcggcgattggtctgtttatcgccaccaatatcgacgacatcatcgtgctctcgctgttttttgcccgcggggcggggcaaaaagggaccacgcttcggattctggctggtcagtacctcggcttcatgggcatcctcgcggccgcagtcctggtcacgctgggggcaggagcattcctacctgctgaggcgatcccgtacttcggactaattcccctggccctgggactatgggcggcctggcaggcctggcgaagcgatgatgacgacgatgatgatgcggagatcgccgggaaaaaggtgggtgtgctgaccgtcgccggtgtgacgtttgccaacggtggcgacaatatcggcgtctacgtcccggtcttcctcaacgtggacactgccgccgtcatcatctactgcatcgttttcctcgtcctggtggcaggcctggtcctgctggcaaagttcgtggccacccgcccgcccatcgcagaagtccttgagcgctgggagcacgtgctgttcccgatcgtcctgatcggcctgggcatcttcatcctcgtcagcggcggcgccttcggcctctaataagcccatcccgagcgccc

SEQ ID NO: 322 - protein, 198 aa, Corynebacterium glutamicum
VATGLLSAIGLFIATNIDDIIVLSLFFARGAGQKGTTLRILAGQYLGFMGILAAAVLVTLGAGAFLPAEAIPYFGLIPLALGLWAAWQAWRSDDDDDDDAEIAGKKVGVLTVAGVTFANGGDNIGVYVPVFLNVDTAAVIIYCIVFLVLVAGLVLLAKFVATRPPIAEVLERWEHVLFPIVLIGLGIFILVSGGAFGL

SEQ ID NO: 323 - DNA, 978 bp, Corynebacterium glutamicum
  CDS (101)..(955): RXA00311
cggacagatcggcatttgggcgaccgtgctgttgatgatcgcccgcatcgcatagggattctctgcagtcgcagaagctgcaggtgcatccacactgaccatggaacattctcctgaaggcaagcgtggattcttcacctcatcggtgatggcgggttgctcagttggaaacgtcctggctggcttggtatttatcccgttcttgatgctgccggaagaacacctcatgtcatggggctggcgcgtacctttcctgctttccgcactggttttagttgtcgcatacttcgtgcgcacccgactggaggaagcatcaactgagaaggccgaagaggacgcaggcgctccggctttggctgtgctgcgcacccagggcattgatgtcgcacgagttttcctgatcaccttcttcgccgttgttcagaccactttcaacgtttacgcactggcatacgccgccaacgaaatcggcatcgatcgttccttcatggtgatggtgaacaccatcgcgctggggctttccatcggaacgattcctttggccgcgtgggtctctgaccgcattggccgcaagccagtcttgctgttcggggccatcacctgtgcaatcaccacctacttctacttccaggcaatctctgaagctgaccttgtgctgatcttcgcactgtgcttggtcaaccaaggtttgttctactcctgctggaacggcgtgtggaccattttcttcccagaaatgttcgcatcttccgtgcgctacaccggcatggctatgggcaaccagctcggtctgatcatcgttggtttcgcaccaaccatcgccaccgccctgtacgcatggaacggttgggaagctgttgcgggattcatcatcggcgcaatcgcactgtctgccgcagttattttgaccaccaaggaaaccgccttcaccaagcttgaagatctagggaagaaataatgtctgacaagatctggaaa

SEQ ID NO: 324 - protein, 285 aa, Corynebacterium glutamicum
MEHSPEGKRGFFTSSVMAGCSVGNVLAGLVFIPFLMLPEEHLMSWGWRVPFLLSALVLVVAYFVRTRLEEASTEKAEEDAGAPALAVLRTQGIDVARVFLITFFAVVQTTFNVYALAYAANEIGIDRSFMVMVNTIALGLSIGTIPLAAWVSDRIGRKPVLLFGAITCAITTYFYFQAISEADLVLIFALCLVNQGLFYSCWNGVWTIFFPEMFASSVRYTGMAMGNQLGLIIVGFAPTIATALYAWNGWEAVAGFIIGAIALSAAVILTTKETAFTKLEDLGKK

SEQ ID NO: 325 - DNA, 549 bp, Corynebacterium glutamicum
  CDS (101)..(526): RXA00312
ccattgaatgggaagaacttggttgtgtgtttgtgacacctattctaaagaacattaaacgtgattaagttcatgattcttaatgagaaagggtgatcacatggaaaccgtgaggaccgcaaccgccgctcctgaaactgcatctttgaagctgcgtgaggcagaaagcccagcaaagtccccaaagaaagccgccttggcgtcacttttgggttcgactctggagtactacgactttgtcatttacggcaccgcctccgcgctgctgttcaatcacctcttcttcccacagggcgacccagtcgtcgcgacgatcggctctctcgcctcattcggtgttgcgtacattgcgcgccccatcggtggtctggtgatgggacatgttggcgataagatcagtcgcaaaaccgccctcatggtgacgttgatgatcatgggtatcgcctccatttccatcggacttctgcccacctacggacagatcggcatttgggcgaccgtgctgttgatgatcgcccgcatcgcatagggattctctgcagtcgcaga

SEQ ID NO: 326 - protein, 142 aa, Corynebacterium glutamicum
METVRTATAAPETASLKLREAESPAKSPKKAALASLLGSTLEYYDFVIYGTASALLFNHLFFPQGDPVVATIGSLASFGVAYIARPIGGLVMGHVGDKISRKTALMVTLMIMGIASISIGLLPTYGQIGIWATVLLMIARIA

SEQ ID NO: 327 - DNA, 888 bp, Corynebacterium glutamicum
  CDS (101)..(865): RXN01411
cttatcgacgtccccatccccctcgccaatgcttcggcgaggggttctatttattgtgtgtgctagccttttcgcaatcgttcagcccgccccgacgtcaatgttgggagtgggctggcgcattccattcctgatggccgtgccactagggcttatcggctggtggatccgcaccggtgcccaggaaaatgtacgccccgcatccgaacgccccgaagctcctattaagcaggcattgcgtactgagtggaagatgatgttgcgggtaggtggctttatctcttgcaccggtctgagcttctacattttcaccacgtacatgaccactttcctgcgcagcaccgtcggactggagggcacgttagtgctggctggaaacatcatcgctctcagcatggcagcaattgtggccccatttgttggccgcgcaattgataaattcccccgccggaacatcatggctttcgctaccttaagcacagtaattatggcgatcccggcctacatcattgcaggtcaaggtactttgactgcttctttgattgcgcaggtaatgcttggaatcggcgcggttaccgctaactgcgttacctcagtaatgatggccgaggtcttccaagaggtcacccgcggtacttccgccggcattacctacaacgtcacttacgcaatcttcggcggctcggctccatttatctccaccgcattggtctcctggaccggcagcccgctggcccctgcggtatacatgatcatcattgcgctcttcgccttcaccgcgtcccgcttcattcctgaaacctccccagtttttgtcaccgcaaccccggccattaaggcaccaaaggtgctggtcaacccgggttaaaccacgcttttcgacgaaaa

SEQ ID NO: 328 - protein, 255 aa, Corynebacterium glutamicum
MLGVGWRIPFLMAVPLGLIGWWIRTGAQENVRPASERPEAPIKQALRTEWKMMLRVGGFISCTGLSFYIFTTYMTTFLRSTVGLEGTLVLAGNIIALSMAAIVAPFVGRAIDKFPRRNIMAFATLSTVIMAIPAYIIAGQGTLTASLIAQVMLGIGAVTANCVTSVMMAEVFQEVTRGTSAGITYNVTYAIFGGSAPFISTALVSWTGSPLAPAVYMIIIALFAFTASRFIPETSPVFVTATPAIKAPKVLVNPG

SEQ ID NO: 329 - DNA, 350 bp, Corynebacterium glutamicum
  CDS (1)..(327): FRXA01411
ttcattgcgcaggtaatgcttggaatcggcgcggttaccgctaactgcgttacctcagtaatgatggccgaggtcttccaagaggtcacccgcggtacttccgccggcattacctacaacgtcacttacgcaatcttcggcggctcggctccatttatctccaccgcattggtctcctggaccggcagcccgctggcccctgcggtatacatgatcatcattgcgctcttcgccttcaccgcgtcccgcttcattcctgaaacctccccagtttttgtcaccgcaaccccggccattaaggcaccaaaggtgctggtcaacccgggttaaaccacgcttttcgacgaaaa

SEQ ID NO: 330 - protein, 109 aa, Corynebacterium glutamicum
FIAQVMLGIGAVTANCVTSVMMAEVFQEVTRGTSAGITYNVTYAIFGGSAPFISTALVSWTGSPLAPAVYMIIIALFAFTASRFIPETSPVFVTATPAIKAPKVLVNPG

SEQ ID NO: 331 - DNA, 1422 bp, Corynebacterium glutamicum
  CDS (101)..(1399): RXA01900
aaaggtgacacgccttacattcttgtggtctgaccatgaggttgggccaatcggtttcagcccgtttactcccgccgtccgtttcagagaagaggtcaccatgacaaccgcagtagatcaaaactcaccgcccaagcagcaactcaacaagcgcgtcctgctgggcagcttgagtggcagcgttatcgaatggttcgacttcctggtttacggaaccgtcgccgcgctggtcttcaacaagatgtacttccccagcggcaacgagttcctctccacaatcctggcgtacgcatccttctccctgaccttcttcttccgccccattggtggcgtcatcttcgcccacatcggcgaccgcattgggcgtaagaagaccctgttcatcaccttgatgctcatgggtggcggcaccgtcgccattggtttgctgcccgactacaacgccatcggcatttgggcaccaatccttctgatgttcctccgcattttgcagggcatcggaattggcggcgaatggggtggcgcactgctcctggcatacgaatacgctccaaagaagcagcgtgggctctacggcgcagttcctcaaatgggcatttccctgggcatgctgcttgcagctggcgtgatctctctgctcaccctcatgccggaagatcagttcctcacctggggctggcgcatcccattcgtcggatccatcctcctagtgttcatcggcctgttcatccgaaacggccttgatgaaacccccgagttcaagcgtatccgcgattccggccagcaggtaaagatgcctctgaaggaagttctgaccaagtactggccagccgttctggtctccatcggcgcaaaagctgccgagaccggccccttctacatcttcggcacctacatcgttgcttacgcaaccaacttcctgaacatccgcgacaacattgtccttctggcagttgcttgcgccgccctcgttgccaccatctggatgccactgttcggatccttctccgaccgcgtcaaccgtgcagtgctctacaggatctgtgcatccgcaaccatcgtgctgattgtcccttactacttggtcctcaacaccggcgaaatttgggcactgtttatcactaccgtgattggcttcggcatcctctggggtagcgtcaacgcaatcctcggaaccgtcatcgcagaaaacttcgcacctgaggtccgctacaccggcgctaccctgggttaccaagtcggagcagcactcttcggcggtaccgcacccattatcgcagcatggctgttcgaaatctccggcggacaatggtggccaatcgccgtctacgtcgctgcatgttgccttctctctgtgatcgcctcgttcttcatccaacgcgtcgcgcaccaagagaactaaaatctaagtaaaacccctcc

SEQ ID NO: 332 - protein, 433 aa, Corynebacterium glutamicum
MTTAVDQNSPPKQQLNKRVLLGSLSGSVIEWFDFLVYGTVAALVFNKMYFPSGNEFLSTILAYASFSLTFFFRPIGGVIFAHIGDRIGRKKTLFITLMLMGGGTVAIGLLPDYNAIGIWAPILLMFLRILQGIGIGGEWGGALLLAYEYAPKKQRGLYGAVPQMGISLGMLLAAGVISLLTLMPEDQFLTWGWRIPFVGSILLVFIGLFIRNGLDETPEFKRIRDSGQQVKMPLKEVLTKYWPAVLVSIGAKAAETGPFYIFGTYIVAYATNFLNIRDNIVLLAVACAALVATIWMPLFGSFSDRVNRAVLYRICASATIVLIVPYYLVLNTGEIWALFITTVIGFGILWGSVNAILGTVIAENFAPEVRYTGATLGYQVGAALFGGTAPIIAAWLFEISGGQWWPIAVYVAACCLLSVIASFFIQRVAHQEN

SEQ ID NO: 333 - DNA, 1524 bp, Corynebacterium glutamicum
  CDS (101)..(1501): RXA02507
attacccacaatttcaatcggtttatacaaccagcctctaactggcaacaggactgcagacagaaactgttgctggaaccttcgatgaacaggatcgacaatgagcgaacaacttcagggtgtaactcactccgaatcaactccgggcaagacgcccaagcgagcagcactatccagctggatcggctcagctctcgaatactacgacttcgctgtttacggaaccgctgcagcgctggttcttaaccacctcttcttcccagctgatacttcaccaggcatcgcaattttggctgcgatgggtaccgtgggtgttgcttatgtggttcgccctcttggtgcgctgatcatgggtccattaggtgaccgttacggacgtaaatttgtcctcatgctgtgcctcttcctgattggagcatccactttcgcagttggctgcttgccaacatttgatcaggtcggttacttggctccggcactgttggtgctgtgccgtgtgatccagggactgtctgcatccggtgagcagtccagtgcgatttccgtttctttggagcacgccgatgagcgtcaccgcgcatttactgctagctggactcttcacggaacccagttcggtaccttgctggcaaccggagtatttatcccattcaccttgttcctgagtgaagatgctctaatgtcatggggttggcgcgttccgttctggctgtccgctgctgttgttttggttgctttcctcatccgtcgtggactggaagagccaccagcattccgtgaaaacaaggaagcagttgcaggcgcagcatctccactggcgatgaccttgcgttaccacaaggcggcggttgctcgcgttgctattgctgcgatgatcaactccgtgaacattgtgtttactgtgtgggcactgtcgttcgccaccaacattgttggcctggatcgttcaactgttttgctggttccagttgttgcgaacttggttgcactgattgcgattcctttgtccggcatgctggctgaccgcattggtcgccgaccagtgttcatcatgggtgccattggtggtggcctggccatgaacggttacctgggagctatctactccggcaattggaccatgatcttcttcatgggcgtgttgatgtctggtctgctgtactccatgggtaatgccgtgtggccagcgttctacgcagaaatgttcccaacctctgtgcgtgtcaccggcttggctcttggaactcagattggtttcgcagtctctggtggtttcgtcccagttatcgcatccgcgcttgctggtgatcagggtgaccagtggatgaaggtgtccatcttcgttggtgttgtttgtgtgatttctgcactggttgccatgaccgctaaggaaaccaaggctctgactctggatgagatcgatgctctgcacactgctggtggtgaggccgcagacctggcagccgcaagcaaagcctccgaggcccaactcgcggctcagtaaaaccaaaaggaatctttgac

SEQ ID NO: 334 - protein, 467 aa, Corynebacterium glutamicum
MSEQLQGVTHSESTPGKTPKRAALSSWIGSALEYYDFAVYGTAAALVLNHLFFPADTSPGIAILAAMGTVGVAYVVRPLGALIMGPLGDRYGRKFVLMLCLFLIGASTFAVGCLPTFDQVGYLAPALLVLCRVIQGLSASGEQSSAISVSLEHADERHRAFTASWTLHGTQFGTLLATGVFIPFTLFLSEDALMSWGWRVPFWLSAAVVLVAFLIRRGLEEPPAFRENKEAVAGAASPLAMTLRYHKAAVARVAIAAMINSVNIVFTVWALSFATNIVGLDRSTVLLVPVVANLVALIAIPLSGMLADRIGRRPVFIMGAIGGGLAMNGYLGAIYSGNWTMIFFMGVLMSGLLYSMGNAVWPAFYAEMFPTSVRVTGLALGTQIGFAVSGGFVPVIASALAGDQGDQWMKVSIFVGVVCVISALVAMTAKETKALTLDEIDALHTAGGEAADLAAASKASEAQLAAQ

SEQ ID NO: 335 - DNA, 955 bp, Corynebacterium glutamicum
  CDS (21)..(932): RXA00445
ggtgcaaaaaaggactaaccatggcggatctgagcattgaacacgtatcaaggtttttcggcgatgccatcgccttgaacgatgtgtcattgaccgtcccctcaggctccatcaccgccatcatcgggccgtccgggagcggtaaaaccacgttactgcgtttgctggcaggccttgattcacccgatgaaggcaccgtgagcattgggaataagatcgccaagctgggtgacactgcgctgtgtttccaggattcgcctttgtatccgcaccttaatgtgtgggaaaacgtggcatttccgctcaagctcaaagccaccaatactgcagatgaggtggtgaaaaagcgggtgagtgatgttttggaaatgctcgaaattgctcccctcgcccgccggaaaattaccgaactctccggcgggcaaaaacagcgcgtcggcattgctcgagcactggtcagagacgtagaggtttaccttttcgacgaaccgatggcccacctcgaccaagccttagcccgcgatattgtggccgatctgcgcaaaattcaacaatcgttgggactgacgtttgtatacgtcacccacagcaaatccgaggcattcgcgctcgccgaccaaattgtcgtgctggtagatggccaagtcgcgcaggttggtgaggcggaggagctcgtcgaaaagccaaaaaccctagaaatagccgagttcctctcccccaccgagctcaatgtgcgccggcgtggggacgccgtggaggcatggcgacccgaagacacccagctcgcccgcggtggcactgcgaccgtggaagccgtgacgtatttgggccgcgagtggcttgtacaaaccaccgaggggcacgccgtgtcggaggaaaaattcgacgtcggcgaaagcgtcacgctaacccagaagaaggtgtttagtttctagccgcctgcaaaaggagggag

SEQ ID NO: 336 - protein, 304 aa, Corynebacterium glutamicum
MADLSIEHVSRFFGDAIALNDVSLTVPSGSITAIIGPSGSGKTTLLRLLAGLDSPDEGTVSIGNKIAKLGDTALCFQDSPLYPHLNVWENVAFPLKLKATNTADEVVKKRVSDVLEMLEIAPLARRKITELSGGQKQRVGIARALVRDVEVYLFDEPMAHLDQALARDIVADLRKIQQSLGLTFVYVTHSKSEAFALADQIVVLVDGQVAQVGEAEELVEKPKTLEIAEFLSPTELNVRRRGDAVEAWRPEDTQLARGGTATVEAVTYLGREWLVQTTEGHAVSEEKFDVGESVTLTQKKVFSF

SEQ ID NO: 337 - DNA, 491 bp, Corynebacterium glutamicum
  CDS (1)..(468): RXA02353
atggcactgctgatcctcgccggtctgcaaatgatcccgaaggaaacctacgaagcagcccgcgtcgatggcgcaaccgcgtggcagcaattcaccaagatcaccctcccgctggtgcgcccagctttgatggtggcagtactcttccgcaccctcgatgcgctacgcatgtatgacctccccgtcatcatgatctccagctcctccaactcccccaccgctgttatctcccagctggttgtggaagacatgcgccaaaacaacttcaactccgcttccgccctttccacactgatcttcctgctgatcttcttcgtggcgttcatcatgatccgattcctcggcgcagatgtttcgggccaacgcggaataaagaaaaagaaactgggcggaaccaaggatgagaaacccaccgctaaggatgctgttgtaaaggccgattctgctgtgaaggaagccgctaagccatgactaaacgaacaaaaggactc

SEQ ID NO: 338 - protein, 156 aa, Corynebacterium glutamicum
MALLILAGLQMIPKETYEAARVDGATAWQQFTKITLPLVRPALMVAVLFRTLDALRMYDLPVIMISSSSNSPTAVISQLVVEDMRQNNFNSASALSTLIFLLIFFVAFIMIRFLGADVSGQRGIKKKKLGGTKDEKPTAKDAVVKADSAVKEAAKP

SEQ ID NO: 339 - DNA, 921 bp, Corynebacterium glutamicum
  CDS (101)..(898): RXA01297
tcctgttgctgctgattatcactgttatccaggttcgatacatggataaggagaacaagcagaaatgatctcgactgatagaaacgttttggtcaaaatcatgggctatgtcggcatggttcttgccatcttgttcattggccttccgctggtatttattgtgctgactagcttcaagcagcagtcagagatttacacccagccggtcacgtggttcccttcggaatttaatttcgataactatgcaaatgttttcgagcgggttccgttcctgaactacttccgcaactcgatcatcatcacggttattttgtgtctggtgaagattatcttgggtgtgatctctgcatatgcgttgtcgattttgcgcttcccgggtcgaaaccttgtgttcttgctggttatctccgcgctgatggtgccttccgaagtgactgttatttccaactatgcgttggtcagtcagcttggttggcgcgatacctaccagggcatcatcgttccgctagcgggtattgctttcggaacgttcctcatgcgtaaccacttcatgtctattccttctgagctcattgaagctgcgcgaatggatcactgtggacacttcaggttgctctggaaggttttgcttccaatctctatgcctacgttggtggcgttctccatgatcaccgtggtgaatgaatggaaccaatacctgtggcctttcctgatggcagaaaccgataattcagcaactctgcccattggtttgaccatgcttcaaaacaatgagggtgtctccaactggggacctgtcatggccgcaacgatcatgaccatgttgcctgtgcttgtgatgttcttggcactgcaggagtacatgatcaagggacttatctccggcgccgtcaagggctaaaaacttctcgctaaaaactt

SEQ ID NO: 340 - protein, 266 aa, Corynebacterium glutamicum
MGYVGMVLAILFIGLPLVFIVLTSFKQQSEIYTQPVTWFPSEFNFDNYANVFERVPFLNYFRNSIIITVILCLVKIILGVISAYALSILRFPGRNLVFLLVISALMVPSEVTVISNYALVSQLGWRDTYQGIIVPLAGIAFGTFLMRNHFMSIPSELIEAARMDHCGHFRLLWKVLLPISMPTLVAFSMITVVNEWNQYLWPFLMAETDNSATLPIGLTMLQNNEGVSNWGPVMAATIMTMLPVLVMFLALQEYMIKGLISGAVKG

SEQ ID NO: 341 - DNA, 899 bp, Corynebacterium glutamicum
  CDS (1)..(876): RXS00088
atcgaagacaaccacggcaccgaagggatctccctgccaatcgagggcgtcgctgcgaccgacaaccgcgcattcgaactgcttgatcgctggggtgtagagctcgttgcagctccacttcagctggttccatttaccgttacgggctacaccgaagagggcggcgtcgctaaccttggctcccaccgcgagccagacctggaagcacttgctgctgcacagccttccctgatcatcaacggccagcgcttcgctcagtactacgatgacatcattgccctgaaccctgacgcaaccgttgttgagctagacccacgcgatggcgagccacttgaccaggagcttatccgccaggctgaaaccctcggtgagatcttcggcgaagaagaagatgctgcaaagatcgttgctgatttcgagtccgcacttgagcgcgctaagaccgcatacgcagcaatctccgaccagaccgtcatggcagttaacgtttccggcggaaacattggctacatcgctccttccgttggacgcacctacggtccaatcttcgacctggttggactcaccccagcactcgaggttggcaacgcgtcctccgaccacgagggcgacgacattaacgtcgaagcaatcgcagctgcaaacccagacctgatcctggtcatggaccgcgatggtggcaccagcacccgcaacgaagctgattacgttccagcagagcagatcgtctccgacaatgaagcactggcaaacgtcaaggctgtcaccgacggatacgtttactacgcacctgcagatacctacaccaacgaaaacatcatcacctacaccgagatcctcaacggcatggcagatatgttcgagaaggcagctcagtaggggatcgatcccacactgac

SEQ ID NO: 342 - protein, 292 aa, Corynebacterium glutamicum
IEDNHGTEGISLPIEGVAATDNRAFELLDRWGVELVAAPLQLVPFTVTGYTEEGGVANLGSHREPDLEALAAAQPSLIINGQRFAQYYDDIIALNPDATVVELDPRDGEPLDQELIRQAETLGEIFGEEEDAAKIVADFESALERAKTAYAAISDQTVMAVNVSGGNIGYIAPSVGRTYGPIFDLVGLTPALEVGNASSDHEGDDINVEAIAAANPDLILVMDRDGGTSTRNEADYVPAEQIVSDNEALANVKAVTDGYVYYAPADTYTNENIITYTEILNGMADMFEKAAQ

SEQ ID NO: 343 - DNA, 1200 bp, Corynebacterium glutamicum
  CDS (101)..(1177): RXS00372
gcagacatttccataagtcctgcgaaatgcgcccattcatgtaaagatgttatttcctcccccaaacactccttaaaatttcaagaagggccttattttcatgtcttcgaagcaccctttgaagcgcactgccgttactgtttttgcactcggcgcttccgctgctctcctcgtggcttgctctgaaccttctgaggacgtttccaccgcagagaccaccactgcaagctcttccgctaacgcatccgatgcagccggtgaaaaagtaaccatcaccgtctacacctctgagcctgaggaaaaggtcgatgagatcaacaaggcgttcatggaagccaacccagatattgaggttgaggtgtaccgcgctggtactggcgatctgactgctcgcattgaagctgaaaaggcatccggttctatcgaggctgatgtgttgtgggctgcggatgctgcaacctttgaaacttatgcagcacagggcgaccttgcagagctggaagatgttgagacttccgacatcattgaagaggctctggatgctgagaacttttatgtaggcacccgcatcatcccaaccgtgattgcatacaacactgaagttgttgatcaggctgagcttcctacgtcttgggctgatctgactgatcctaagtatgcaggccaactggtcatgccggatccagctgtgtctggtgctgcagccttcaatgcttctgtgtggaagaacgaccctgcgcttggcgaagcctggatcaccgccttgggtgaaaaccaaccaatgatcgctcagtccaacggcccaacctcccaggagatcgctggcggtggccacccagtgggcatcgtggtggactacttggtgcgcgacttggctgctgctggatctccaatcgacaccatctacgcatcggagggttctccttacatcactgagcctgcaggtgtgttcgctgattctgaaaagaaggaagcagccgagcgctacatcaacttcctgctgtctgttgaaggccaggaaatcgcagttgagcaggcatacctgccagtgcgtgaagatgtcggaactccagagggcacccccgagttggctgacatcgagctcatgacccctgacctggaggttgtaaccgctgataaggcggctgctgttgagttcttccaaaacgcaatgaactagttttcctatgcagttatctc

SEQ ID NO: 344 - protein, 359 aa, Corynebacterium glutamicum
MSSKHPLKRTAVTVFALGASAALLVACSEPSEDVSTAETTTASSSANASDAAGEKVTITVYTSEPEEKVDEINKAFMEANPDIEVEVYRAGTGDLTARIEAEKASGSIEADVLWAADAATFETYAAQGDLAELEDVETSDIIEEALDAENFYVGTRIIPTVIAYNTEVVDQAELPTSWADLTDPKYAGQLVMPDPAVSGAAAFNASVWKNDPALGEAWITALGENQPMIAQSNGPTSQEIAGGGHPVGIVVDYLVRDLAAAGSPIDTIYASEGSPYITEPAGVFADSEKKEAAERYINFLLSVEGQEIAVEQAYLPVREDVGTPEGTPELADIELMTPDLEVVTADKAAAVEFFQNAMN

SEQ ID NO: 345 - DNA, 1059 bp, Corynebacterium glutamicum
  CDS (101)..(1036): RXS02590
gccccaaaggcttaaagtaatgggcatgcccactccttcttcgaccaaaagctacgctgcggtcttacctccacctggcccctcgtgggctggttccctcatgggcatctcattgttgtcatcactgttgaaaatccatggttttccagtcgtcgcagatttcttcttcgcgttagctgttgtggtggcaattgtcattattggcggttggctaatctaccgctctccttcattcaaaactgaagtcatgccggcatgggcaatgctgtccatgggtttgatcgcattgggaactgcaagccccgtagttttgggtgatgatctgtggggatttatgtttgtgtgctggtctattggcacagccgtgggacttgttgcctattccttatatataacggccattttgcgatctaaggcgggcacaccaacttttgcgtggggtcttcctcttgtcacgccgatggttgcttccacctcggcagcacaactccatgagcactttgaacttccggcgatgctgtgggtttctttcgggctcttccttttaactttggcgtctgcaccagcagtttttacccgagtgtatttctactatttcggccccaaggcgcagggcatcccactgatggcaacaccaacatcatggattcctttgggtatggtgggccaatccactgcagcagctcagctcatcggtgcgtcctttggatccaagacagcaatcacaatgggcattatttacggcatcatcatgggaatttttacgattcctctgggagccatcgctcactttgtgttctacagagctgttttcaaaggggcgacatacagccccacatggtgggccagtaccttcccagttggcactttgagtttgggtgcgcattttttatcacagagcaccggagtggagtggtttaactacttcagcctgtacttgattgctttaatgctctttcatgtcatcgtgtccaccatcgccggtacgattgcagtaatgagaagaatcgtcggaaagcttaaatctcaactggcctaaattgcagcgagaggtctaaa

SEQ ID NO: 346 - protein, 312 aa, Corynebacterium glutamicum
MGISLLSSLLKIHGFPVVADFFFALAVVVAIVIIGGWLIYRSPSFKTEVMPAWAMLSMGLIALGTASPVVLGDDLWGFMFVCWSIGTAVGLVAYSLYITAILRSKAGTPTFAWGLPLVTPMVASTSAAQLHEHFELPAMLWVSFGLFLLTLASAPAVFTRVYFYYFGPKAQGIPLMATPTSWIPLGMVGQSTAAAQLIGASFGSKTAITMGIIYGIIMGIFTIPLGAIAHFVFYRAVFKGATYSPTWWASTFPVGTLSLGAHFLSQSTGVEWFNYFSLYLIALMLFHVIVSTIAGTIAVMRRIVGKLKSQLA

SEQ ID NO: 347 - DNA, 1725 bp, Corynebacterium glutamicum
  CDS (101)..(1702): RXS00758
ttcaagtttggctgtgactcatgtcgcacatagtatttcaatcaccggatccgcacgattgcaaaatcctggggaatattcataacaacggaggtcactcatgactttgaagaagtctctcgctgtaaccacggcggctgcacttgctttgagccttgccgcttgctcgtccgactcctcgtccgacagctcctcatcctcatcaggcagcgaaggcggcgacaactacgtcctcgtcaacggcactgagccacagaacccgctcgtcccaggcaacaccaacgaagtaggtggcggtcgcatcgtcgacagcatcttctccggcctggtctactacgacgtcgacggctcccctgtcaacgatgttgcagagtccatcgaactcgaaggtgacaagacctaccgcatcaccatcaaagacggccagaccttcaccgatggcaccccagttaccgctgagagctttgtcaacgcatggaactacaacgtagctaacagcacgctgtcctcctacttctttgagtccatcctcggctacgaagaaggcgtcgagtccatggaaggcctccaggtcgtcgacgacaccaccttcaccgtcgagctcacccagcctgagtccgacttcccactgcgcctgggatactccgcattcttcccgcttcctgaatccgcatttgacgacatggacgcattcggtgagaacccaatcggcaacggtccatacaagctccaagagtggaaccacaaccaggacgccaccatcgttcctaacgcggactacaccggtggacgccaggctcagaacgacggcgtgaagttcatcttctacccaaccttcgactccgcttacgcggacctgctctccgacaacttggatgtgctggacgctatcccagactccgcgttctcctccttcgaggacgagctctctggccgttccatcaaccagccttccgctgtgttccagtccttcaccatcccggagagccttgagcacttctccggcgaagaaggcgtgctgcgtcgccaggccatctccttggccgtcaaccgcgacgagatcacccaaaccatcttcgaaggcacccgcaccccagcgacggacttcacctcccctgtcatcgacggacactctgattccctccagggcgcagatgtcttgacctacgatccagagcgcgctcaggaactgtgggcacaggcagacgagatcagcccttggtccggcgagttctccatctcctacaacgcagacggtggacaccaggcatgggtggacgcaaccgccaattccatccgcaacaccctgggtatcgacgccatcggcaacccatacccagacttcaagtccctgcgtgacgatgtcaccaaccgcaccatcaacggcgcattccgcaccggctggcaggcagactacccgtccttgggcaacttcctcggacctttgtacggcaccggtgcaggctccaacgatggtgactactccaacccagatttcgatgccaagctcgccgaagcagcaaacgcggccgatgttgacgcatcaaccccgctatacaacgaagcacaggaaatcctgctccaggatctcccagcgatcccaacttggtactccaacgcagttggtggatactccaccaacgtggacaacgtggaattccagtggaactcgcaacctgcgtactaccagatcaccaagaactagtagcttcgcaccacccgctc

SEQ ID NO: 348 - protein, 534 aa, Corynebacterium glutamicum
MTLKKSLAVTTAAALALSLAACSSDSSSDSSSSSSGSEGGDNYVLVNGTEPQNPLVPGNTNEVGGGRIVDSIFSGLVYYDVDGSPVNDVAESIELEGDKTYRITIKDGQTFTDGTPVTAESFVNAWNYNVANSTLSSYFFESILGYEEGVESMEGLQVVDDTTFTVELTQPESDFPLRLGYSAFFPLPESAFDDMDAFGENPIGNGPYKLQEWNHNQDATIVPNADYTGGRQAQNDGVKFIFYPTFDSAYADLLSDNLDVLDAIPDSAFSSFEDELSGRSINQPSAVFQSFTIPESLEHFSGEEGVLRRQAISLAVNRDEITQTIFEGTRTPATDFTSPVIDGHSDSLQGADVLTYDPERAQELWAQADEISPWSGEFSISYNADGGHQAWVDATANSIRNTLGIDAIGNPYPDFKSLRDDVTNRTINGAFRTGWQADYPSLGNFLGPLYGTGAGSNDGDYSNPDFDAKLAEAANAADVDASTPLYNEAQEILLQDLPAIPTWYSNAVGGYSTNVDNVEFQWNSQPAYYQITKN

SEQ ID NO: 349 - DNA, 1698 bp, Corynebacterium glutamicum
  CDS (101)..(1675): RXS01346
aaggtgtggtgagtcactggctagatttgatttgttggccataccaaatcggcccacacaggcacgttgcaaacagcaacgctcacccataggagatttaatgcgcacagccacaaaagtcatcgcaacagtgatggcctcaaccctggctatcgggctggcatcttgttccagctctagtggcaccccagacgtgaattacgtatccgtcaacggcaccgaacctcagcgcggactcatcccgggcgacaccaatgaaaacggcggtgggcgagtggtggacatgctgtactctgggctcgtctactttgatgaagctggcgttgctcaaaatgacctggcggcatcaattgaccaggaaacagacaccacctacaaaatcactttgcgtgatggcatcaaattcagtgacggatcggatattactgccactgattttgtggatacctggaattttgtagtggaaaatggactgctcaacacttctttcttctcaccgattaaagggtatgaggagggcgtggaaacgctcgagggtttgaatgtggtggatgatcgcacatttaccatcgagcttgcccaaccggattctgagttcacccaacgcattggctactacggttttgcaccgatgccagcttcggctcgcgatgatattgacgcctttggtgaaaaccccgtgtcctctggcccttacaaactagagcagtgggatcacaacgcagaactgaaagtggtggccaatgaacactacgatggcccgcgcgcagccaacaacgatggcttgaagtacgtgttctacgcccaaaatgatgcagcttattcagatctgttggctggaaacctagatgtgctggatctcattccaccatcggcgtacaccacctatgaagaggaactgtcgggtcgatccattaatcaacctgcggcctcctatctggaactctccattcgcatggaatcccccaactttgaagggcaacagggacagttgcgtcgacaagcaatttctatggcgattaaccgtgaagaaatcgctgagcagatcttcgccggcacctacacgcctgcgctcgacttcaccgcgcccgtgctcgacggctggcgcgatgatttgaacggcaatgacgtgctgactttccagcctgacaaggcccgtgagctgtgggaagacgctgaggagatcgcaccttttgagggcgaattgcagatcagttacaacgcggatgttcccaaccgggaatgggtggatgcggtagcaaacagcatcagcaacgaattagacgtcaacgccactggcaatcctttccccgattttaaatccttccgcgacacataccgcaccaccggattggatggcgcctaccgcaccgcgtggtttgcggactacccaagcatcggcaacttccttggacctaactacacctcgggcgtggcctccaacgatgccaagtacgaaaacccagaatttgatcaattgattgccgacgccgcagcagcctccaccaaggaggaaaccttccaggcatatgcgcaggcccaggaaatgttgttgcgcgatcttcccgcaatcccactgtggtacccgaatgtggttggcggctactcagaatccgtggacaacgtctccgtaaactggaaggccatacctgtttattgggcaattacaaagcaataaactcattaacctaaatccgg

SEQ ID NO: 350 - protein, 525 aa, Corynebacterium glutamicum
MRTATKVIATVMASTLAIGLASCSSSSGTPDVNYVSVNGTEPQRGLIPGDTNENGGGRVVDMLYSGLVYFDEAGVAQNDLAASIDQETDTTYKITLRDGIKFSDGSDITATDFVDTWNFVVENGLLNTSFFSPIKGYEEGVETLEGLNVVDDRTFTIELAQPDSEFTQRIGYYGFAPMPASARDDIDAFGENPVSSGPYKLEQWDHNAELKVVANEHYDGPRAANNDGLKYVFYAQNDAAYSDLLAGNLDVLDLIPPSAYTTYEEELSGRSINQPAASYLELSIRMESPNFEGQQGQLRRQAISMAINREEIAEQIFAGTYTPALDFTAPVLDGWRDDLNGNDVLTFQPDKARELWEDAEEIAPFEGELQISYNADVPNREWVDAVANSISNELDVNATGNPFPDFKSFRDTYRTTGLDGAYRTAWFADYPSIGNFLGPNYTSGVASNDAKYENPEFDQLIADAAAASTKEETFQAYAQAQEMLLRDLPAIPLWYPNVVGGYSESVDNVSVNWKAIPVYWAITKQ

SEQ ID NO: 351 - DNA, 321 bp, Corynebacterium glutamicum
  CDS (26)..(298): RXS00912
ccacacctttgaaaggagctaagcgatggacaacaccctctacacagcaggcctcacaatcgcagctgcctttttcatgctgtcgttcatcttcaccatctaccgcatcatcgtcgggcccaactccatcgatcgcctactcggcctggacggaaccgtctccatgattcaatgctccatggccacctacatctgctggacactcgacaccaccgtcaccaacttcatgatggtcatcgcactcttaggattcatcagctctgtatccgtagcccgcttccgcaagagggatggtgcctaaatgaccctgcaactattcac

SEQ ID NO: 352 - protein, 91 aa, Corynebacterium glutamicum
MDNTLYTAGLTIAAAFFMLSFIFTIYRIIVGPNSIDRLLGLDGTVSMIQCSMATYICWTLDTTVTNFMMVIALLGFISSVSVARFRKRDGA

SEQ ID NO: 353 - DNA, 2472 bp, Corynebacterium glutamicum
  CDS (101)..(2449): RXS00453
tagtggggcgtgaaaaaatagctcatttaagaggagaagcaaccccgtggcgaaattgctattcaggttggggcgatggtcctataatcgcaagtggattgtgatttcggcatggctacttattttggccattgttggtggtctggccctgacgatgcagaaggggttcagtaactctttcactattgaagacaccccttcgattgatgccactgtttctctggttgaaaatttccctgatcagacgaacccggtgacggccgccggagttaacgtggttttccaatccccggaaggaaccacgcttgatgatcctcagatgatgactgcgatggatgcagtcgttgattacattgaggacaatttgcctgattttggtgggggagagcgcttcggcaatcctgttgaggtgtctcctgcgttggaagagatggtcatcgagcagatgaccagcatggggcttcctgaggaaaccgctgcaaaggatgctgccaatctggcggtgttgagcgaagacaaaaccattggctacacctctttcaacattgatgttgaggccgcagaatatgtggagcaaaaacaccgcgatgtgatcaacgaagcgatgcaaatcggtgaagatttaggtgtccgggtggaagccggtggacctgctttcggtgatccaattcagattgaaaccaccagtgagatcatcggtattggcatcgcgttcatcgtgttgattttcacctttggttctttgattgctgcaggcttgcctttgattaccgcggtgatcggcgtgggcattggtgcgctggcaattgtgctggccacggcgtttactgatctcaacaatgtgactccagtgctcgcagtgatgattggcctggccgtgggcattgactacgcgctgtttattttgtctaggtaccgtgcggagtataagcgcatgccacgtgccgatgctgccggaatggcggtgggcacagctggtagtgcggtggtgtttgctggcgcgacggtgattatcgcgctggtagccctcatcattgcggatatcggattcctcacggccatgggtatttctgcggcgtttacggtgttcgtggctgtgctcattgcgttgacgtttatcccggcgctgttgggtgtgtttggtggtcatgcgttcaagggcaagatccctggaattggtggaaacccaacgccaaagcagacgtgggagcaagcgcttaatcgtcgttccaagggtcgctcatgggtcaagcttgtacagaaagcaccgggtcttgtggtggcagtggtggtcttgggtcttggtgccttgaccattcctgcaatgaacctgcagttgtcactgccttctgactccacctccaatattgataccactcagcgtcagtcggctgatttgatggcagagggctttggcgcgggcgttaatgcgccgttcttggtcatcgtcgatacgcatgaggtcaatgctgattccaccgcattgcagccactgattgaggcacaggagcctgaagagggcgagttcgatcgggagcaggcggctcgttttgctacctatatgtatgtcacccagacctacaattccaacatcgatgtgaagaatgcgcagatcatcagcgtcaatgatgatttcactgcggcgcagattctcgtgactccatacaccggacctgcggataaagagacccctgagttgatgcacgtgctgcgtgcgcaggaagctcagattgaggatgttacgggaactgaactgggtaccactgggtttacggcggttcagttggacattactgagcagctggaagacgcaatgccggtttacctcgctgtggttgttggtttggctattttcctcctcattctggtgttccgttccctgcttgttccgctggttgctggccttggcttcttgttgtctgtgggtgcggccttcggtgcgacggtgttggtctggcaggagggcttcggtggctttgtgaacacccctggtccgctgatttccttcatgccgatcttcctcatcggcgtgaccttcggtttggccatggactatcaggtgttccttgtgactcgcatgcgcgagcactacacccaccacaatggcaagggacagcctggttccaagtacaccccggttgagcagtcagtgattgaaggcttcacgcagggctcccgcgtggttacagcagcggcactgatcatgattgccgtgttcgtggcgtttattgatcagccgttgccatttattaagatcttcggtttcgcgttgggtgcgggcgtgtttttcgatgctttcttcattcgcatgggtctggtccccgcgtcgatgttcctgatgggcaaggccacgtggtggatgcctaagtggctggatcgaattctgccaagtttggacattgaaggcaccgcactggagaaggaatgggaggagaagcaggctgcacgttagacttggcacctatgtcagat

SEQ ID NO: 354 - protein, 783 aa, Corynebacterium glutamicum
VISAWLLILAIVGGLALTMQKGFSNSFTIEDTPSIDATVSLVENFPDQTNPVTAAGVNVVFQSPEGTTLDDPQMMTAMDAVVDYIEDNLPDFGGGERFGNPVEVSPALEEMVIEQMTSMGLPEETAAKDAANLAVLSEDKTIGYTSFNIDVEAAEYVEQKHRDVINEAMQIGEDLGVRVEAGGPAFGDPIQIETTSEIIGIGIAFIVLIFTFGSLIAAGLPLITAVIGVGIGALAIVLATAFTDLNNVTPVLAVMIGLAVGIDYALFILSRYRAEYKRMPRADAAGMAVGTAGSAVVFAGATVIIALVALIIADIGFLTAMGISAAFTVFVAVLIALTFIPALLGVFGGHAFKGKIPGIGGNPTPKQTWEQALNRRSKGRSWVKLVQKAPGLVVAVVVLGLGALTIPAMNLQLSLPSDSTSNIDTTQRQSADLMAEGFGAGVNAPFLVIVDTHEVNADSTALQPLIEAQEPEEGEFDREQAARFATYMYVTQTYNSNIDVKNAQIISVNDDFTAAQILVTPYTGPADKETPELMHVLRAQEAQIEDVTGTELGTTGFTAVQLDITEQLEDAMPVYLAVVVGLAIFLLILVFRSLLVPLVAGLGFLLSVGAAFGATVLVWQEGFGGFVNTPGPLISFMPIFLIGVTFGLAMDYQVFLVTRMREHYTHHNGKGQPGSKYTPVEQSVIEGFTQGSRVVTAAALIMIAVFVAFIDQPLPFIKIFGFALGAGVFFDAFFIRMGLVPASMFLMGKATWWMPKWLDRILPSLDIEGTALEKEWEEKQAAR

SEQ ID NO: 355 - DNA, 597 bp, Corynebacterium glutamicum
  CDS (101)..(574): RXS00932
cccaattaatttatgcacttcggtgaggttactcacaaagagtagcgtgcaaagcccagcaataaggtgatgtttcaacgattaggttacggtaggggccatgacgccacagaaacttcaccgttttgcagcccttttagaaatgggtacctggaccctgctgatcatcggcatgatcttaaaatacagtggagtgacagacgccgtaacccctattgccggcggtatccacggctttggcttcctctgttttgcagccatcaccatcaccgtgtggatcaataataagtggacattcccgcagggtatcgcaggtttgatcgtctctgttatcccgtgggctgcattgccatttgcattgtgggcagacaagaagggcctcgttgccggcggatggcgcttttcagatccgtccgaaaagccacacactttctttgacaagatcttggctcaattggtcaggcacccaatccgatccattttaattctgctggtgattatcgccgtcgtcttctctatcttgctggcgatgggaccaccttatgatccagatgccatcgcaaacactgtggattaaacaacagcctccttcacatg

SEQ ID NO: 356 - protein, 158 aa, Corynebacterium glutamicum
MTPQKLHRFAALLEMGTWTLLIIGMILKYSGVTDAVTPIAGGIHGFGFLCFAAITITVWINNKWTFPQGIAGLIVSVIPWAALPFALWADKKGLVAGGWRFSDPSEKPHTFFDKILAQLVRHPIRSILILLVIIAVVFSILLAMGPPYDPDAIANTVD

SEQ ID NO: 357 - DNA, 2313 bp, Corynebacterium glutamicum
  CDS (101)..(2290): RXS00479
tagatcccaaggctcaaaatttattacttaaacaagttgagcaactagccagccgcaaatcttagaactaacctttacgcctttaacggaagtgaatttgatgtctactagcatcacaacagagaacaagaagaaatctggtcctcctcgcttgatgagaatctttctgcccgccttgctaattttagtttggcttgtaggagctggagtcggcggtccttattttggcaaggttagtgaggtctcctccaacagccagaccacatatctgccagaatctgccgatgccactcaagtacaggaacagttgggagattttactgattctgaatccatcccagccattgtcgtaatggtcagcgatgaacccttaacacagcaagacatcacacaactcaatgaagttgttgctgggctttcagaattagacatagtttccgatgaagtctcccctgctattccatccgaggacggcagagctgtccaagtgtttgtccccctcaatccatcagcggagctgacggaaagcgtcgagaagctctctgagaccttgacccagcaaacgccggactatgtgagcacctatgtgaccggaccggctgggtttaccgctgatctcagcgcagctttcgcgggtattgatgggctactcctagcagtcgccttggctgccgtccttgtcattcttgtcatcgtctatcgctccttcattctgcccatcgccgtgcttgccaccagtttgtttgcgctgactgtagctctattggtggtgtggtggctagctaagtgggacatcctgctgctttcgggtcagactcaaggcatcctcttcattctggtcattggcgccgccaccgactactcattgctatacgttgctcgtttccgtgaagagttacgcgttcaacaagataaagggatagccacagggaaagccatccgggcatcggtggaacccattcttgcctcgggcagcactgttattgcgggcctcctttgtttgctatttagtgatttgaaatctaactccacgctaggtccagtagcttcggtgggcattatttttgcaatgctttctgctcttactctgctaccagccctgctgtttgtattcggtcgggtggccttttggcccaagcgaccaaaatacgaacctgaaaaagcccgtgcgaaaaacgacatccccgccagcgggatctggtcaaaagtggctgatttagtggagcagcatcctcgtgcaatctgggtatctacacttattgtgcttctcttgggtgcggctttcgttcccacactaaaagcggacggtgtgtcccaatccgacctagttctgggttcctctgaagcacgtgatggccagcaggctttaggcgaacacttccccggtggatccggcagtcctgcttatattatcgttgatgaaacacaggcagcacaggctgctgacgtagtccttaacaacgacaatttcgagactgtaactgtaactagtgctgactccccctctggctcagccccaatcaccgctgacggtattgtgccgttaggttctggtacagctccaggcccggtagttgtagaagggcaagtccttttacaagcaacacttgtcgaagcaccagattccgaagaagctcaaaaagctattcgcagtatccgccaaacttttgcagatgaaaatatatcagcggtagtaggcggtgtcactgcaacttccgtagacactaacgatgcctccatccatgaccgcaacctgatcatcccaattgtattgctggtcattttggttattctcatgctgttgctgcggtctattgtcgcaccactcctgctagtagtcaccaccgtggtgtcttttgctactgctttaggcgtggctgctttacttttcaatcacgttttcagtttcccaggagcagaccccgcagtacctctctacggatttgtatttttagtagccttgggcatcgactacaacattttcttagtcacccgaatccgtgaagaaaccaaaacccacggcacaagacttggaattcttcgaggcctgacagtaaccggcggagtaattacctcagctggagtagttctcgccgcaacgttcgcagcactctatgtcatcccaattctattcctggcacaaattgccttcattgtcgcttttggagttcttattgataccctgctcgttcgcgccttcttggtgcctgctttgttctacgacatcggaccgaaaatctggtggccgtcaaaattgtccaatcagaaataccagaagcagcctcagctatgacacaccaaaattcgcctctc

SEQ ID NO: 358 - protein, 730 aa, Corynebacterium glutamicum
MSTSITTENKKKSGPPRLMRIFLPALLILVWLVGAGVGGPYFGKVSEVSSNSQTTYLPESADATQVQEQLGDFTDSESIPAIVVMVSDEPLTQQDITQLNEVVAGLSELDIVSDEVSPAIPSEDGRAVQVFVPLNPSAELTESVEKLSETLTQQTPDYVSTYVTGPAGFTADLSAAFAGIDGLLLAVALAAVLVILVIVYRSFILPIAVLATSLFALTVALLVVWWLAKWDILLLSGQTQGILFILVIGAATDYSLLYVARFREELRVQQDKGIATGKAIRASVEPILASGSTVIAGLLCLLFSDLKSNSTLGPVASVGIIFAMLSALTLLPALLFVFGRVAFWPKRPKYEPEKARAKNDIPASGIWSKVADLVEQHPRAIWVSTLIVLLLGAAFVPTLKADGVSQSDLVLGSSEARDGQQALGEHFPGGSGSPAYIIVDETQAAQAADVVLNNDNFETVTVTSADSPSGSAPITADGIVPLGSGTAPGPVVVEGQVLLQATLVEAPDSEEAQKAIRSIRQTFADENISAVVGGVTATSVDTNDASIHDRNLIIPIVLLVILVILMLLLRSIVAPLLLVVTTVVSFATALGVAALLFNHVFSFPGADPAVPLYGFVFLVALGIDYNIFLVTRIREETKTHGTRLGILRGLTVTGGVITSAGVVLAATFAALYVIPILFLAQIAFIVAFGVLIDTLLVRAFLVPALFYDIGPKIWWPSKLSNQKYQKQPQL

SEQ ID NO: 359 - DNA, 393 bp, Corynebacterium glutamicum
  CDS (101)..(370): RXS02586
ttctctgagatcgtcatgatgaagtacatcgcgttcggcatgatcgcagcgctgattctggatgccaccatcatccgcatgctgcttgtcccccgccgtgatgcacctgcttcgcgacgacaactggtgggcacccggcttcgttaaaaaggcctacaccgtcatgggtcacggctctgaggtggaggaagcacctcgcccaaccacccgtcgcctcaacgacgatgaggaagtcaccgtgcatgaagcagttgtcgctggcgataccgtggcatctcgcggtggtttgagcacgcaggaaaaccgtgatctggtgtccttcgtggaacttaaggctcgtttggaaaagcgcaggcttgaggatctagattaaatctatgcgaggatttttca

SEQ ID NO: 360 - protein, 90 aa, Corynebacterium glutamicum
MHLLRDDNWWAPGFVKKAYTVMGHGSEVEEAPRPTTRRLNDDEEVTVHEAVVAGDTVASRGGLSTQENRDLVSFVELKARLEKRRLEDLD

SEQ ID NO: 361 - DNA, 2214 bp, Corynebacterium glutamicum
  CDS (101)..(2191): RXS02587
agcctggataacctgccagacggtggcgcatggctgcagccgttccgccctctgactgccttgttatccaaccgccacaattcccaggagtaatccacccgtgttttctaaatggggccactttgcttacagatttaggcgcattgttccgttagtcgtcatcgccgcgattttggctttgtttgtcattttcggcaccaagctgggcgaccgcatgagccaggaaggatgggatgatcctggttcttcctcgaccgctgcggcgcgcatcgagttggagacctttgggcgtgacaatgacggcgatgtcgtgttgctgtttactgcgcctgaaggcacttctttcgatgatgcagaggtgttctccagcatctctggctacttagatgggctaatcgagaacaaccctgatgaagtcagccacatcaacagctactttgacactcgtaatcaaaatctcctcagcaaagacggcacccaaacctttgcagctctcgggctcaaaggtgacggcgagcaaacgctgaaggacttccgggagattgaagatcagctccatccggacaaccttgccggtggcgtcaccactgaggtcgcgggtgccaccgctgtagccgacgcactcgatgagggcatggctggcgatatttcacgcgccgaagtttttgcgctgcctttcgtggctatcttgctgctcatcgtgtttggctcagttgttgccgcggcgatgccattgatcgtgggcattttgtccatcttgggttcgctgggcatcttggcaattttggctggattcttccaggtcaacgtatttgcacaatctgttgtgacccttctgggcttgggtcttgccattgactatggcttattcatggtctctcgtttccgtgaggaaatggataagggcaccccggttgaacaggctgttgccaccactacggcgaccgcgggtaagactgtggtgttctctgcagcgatggtggctgtggcgctgtccgggttgtttgttttcccacaggctttcttgaagtcggtggcattcggtgcgatttccgcggttggccttgctgctttgatgtcggtgacggtgttgccgtcgctgttcagcatgttgggtaagaatatcgataagtggagtttgcgtcgcactgctcgaacagcgcgccgtttggaagacaccatttggtaccgcgtgccggcatgggcaatgcgccatgccaaggcagtgaccgtgggcgtcgtattgctcttgcttgctcttacagtgccgttgacgggcgtgaaattcggcggcatcaatgaaacgtatctgccaccagctaacgacacccgcgtcgcccaagagcgtttcgacgaggcgtttcccgccttccgcaccgagccggtcaagcttgtggtcaccggggcggacaacaaccagctgatcgatatctatgttcaggccaacgaagttgagggactgacagatcgtttcaccgcaggtgcgactaccgatgatggcaccacggtgttgtctactggtattcaggatcgttccctcaatgagcaggtagtggagcagcttcgcgctatttccgtccctgagggcgttgaggtgcagatcggtggcactccagccatggagatcgaatccattgaggcgctctttgaaaagctcctctggatggctctctacattgtgctggccactttcatcctcatggcattggtatttggttcggtgattttgccggcgaaggccatcatcatgaccattctgggtatgggtgccaccttgggtattctcaccttgatgttcgtcgatggcgtgggtgccagcgcattgaacttctcccctggcccactgatgagtccagtgctggtgctgatcatggctattatttacggactttccaccgactatgaggtgttcctggtatctcgcatggtggaggcccgcgataaaggcgaatccaccgacgacgccatcagatacggcactgcacacaccggatctatcatcaccgcggccgcactgatcatgattgtggtctgtggagcgtttggtttctctgagatcgtcatgatgaagtacatcgcgttcggcatgatcgcagcgctgattctggatgccaccatcatccgcatgctgcttgtcccccgccgtgatgcacctgcttcgcgacgacaactggtgggcacccggcttcgttaaaaaggcctacaccgtcatgg

SEQ ID NO: 362 - protein, 697 aa, Corynebacterium glutamicum
VFSKWGHFAYRFRRIVPLVVIAAILALFVIFGTKLGDRMSQEGWDDPGSSSTAAARIELETFGRDNDGDVVLLFTAPEGTSFDDAEVFSSISGYLDGLIENNPDEVSHINSYFDTRNQNLLSKDGTQTFAALGLKGDGEQTLKDFREIEDQLHPDNLAGGVTTEVAGATAVADALDEGMAGDISRAEVFALPFVAILLLIVFGSVVAAAMPLIVGILSILGSLGILAILAGFFQVNVFAQSVVTLLGLGLAIDYGLFMVSRFREEMDKGTPVEQAVATTTATAGKTVVFSAAMVAVALSGLFVFPQAFLKSVAFGAISAVGLAALMSVTVLPSLFSMLGKNIDKWSLRRTARTARRLEDTIWYRVPAWAMRHAKAVTVGVVLLLLALTVPLTGVKFGGINETYLPPANDTRVAQERFDEAFPAFRTEPVKLVVTGADNNQLIDIYVQANEVEGLTDRFTAGATTDDGTTVLSTGIQDRSLNEQVVEQLRAISVPEGVEVQIGGTPAMEIESIEALFEKLLWMALYIVLATFILMALVFGSVILPAKAIIMTILGMGATLGILTLMFVDGVGASALNFSPGPLMSPVLVLIMAIIYGLSTDYEVFLVSRMVEARDKGESTDDAIRYGTAHTGSIITAAALIMIVVCGAFGFSEIVMMKYIAFGMIAALILDATIIRMLLVPRRDAPASRRQLVGTRLR

SEQ ID NO: 363 - DNA, 729 bp, Corynebacterium glutamicum
  CDS (101)..(706): RXS03042
atgacaccggcgcgacgtatggcattactggcgtaccccaatttacgatgacatctctgctcgcctcggcgacgtcctggttccttacgttctgatcgttttggttctagcgttcctcgtgctgttgctcgtgttccggtccatttgggtcccattgatcgcggctctgggctttggcttgtcagttctggctacctttggtgctaccgtggcgatcttccaagaaggtgctttcggcatcatcgacgatcctcagccactgctgtccttcttgccgatcatgctcatcggcctggtatttggtctggccatggattaccagatcttcctcgttactcgtatgcgtgagggcttcaccaagggcaagactgcgggcaacgcaacgtcgaatggtttcaagcacggtgcccgcgtggtcactgctgcggcgctgatcatggtgtctgtgttcgcggcattcatagcgcaggacatggcgtttattaagaccatgggctttgctctggccgttgctgtgttcttcgatgccttcgttgttcgcatgatgattatccctgcaacaatgttcctgcttgatgacaaggcttggtggctacctaagtggttggataagattcttcccaacgttgatgttgaaggtgagggtcttagtgaactacatgaggctcgcaccgaggaactgaaggaaaatgtaggtgtcggggcttagagaaacaaaaaaggctgcta

SEQ ID NO: 364 - protein, 202 aa, Corynebacterium glutamicum
LVLAFLVLLLVFRSIWVPLIAALGFGLSVLATFGATVAIFQEGAFGIIDDPQPLLSFLPIMLIGLVFGLAMDYQIFLVTRMREGFTKGKTAGNATSNGFKHGARVVTAAALIMVSVFAAFIAQDMAFIKTMGFALAVAVFFDAFVVRMMIIPATMFLLDDKAWWLPKWLDKILPNVDVEGEGLSELHEARTEELKENVGVGA

SEQ ID NO: 365 - DNA, 826 bp, Corynebacterium glutamicum
  CDS (101)..(826): RXS03075
tgtgcaaaattgcattcaggctgaaaaattcctaaagggactccgtccgaataattggaaagcccagaagaacagtcaactcctagattaaaggataatcgtggcgaaattcctgtataagttaggctccacggcctatcaaaagaaatggccgtttcttgcggtctggctcgtgattctcataggtatcacgacgctggcggggctgtatgccaagccaacgtcgagtagcttctctatccctggtcttgattctgtcacgaccatggagaagatgcaggagcgtttccctggttcggatgatgcaacatcggctcccactggttctgtcgtcattcaggcaccggaaggcaagaccctcactgatcctgaggttggggctgaagtaaaccagatgcttgatgaggttcgggcgactggtgtgctgaaggatgctgattccgttgtggatcctgtgttggctgcgcagggtgtggctgctcagatgaccccagccctggaggctcagggtgtacctgcggagaagatcgccgcagatattgagtcgattagtccactgagtgcagatgagactaccggcatcatctcgatgacttttgatgcagattctgccatggatatatccgcagaggatcgtgagaaggtcaccaatattcttgatgaatacgatgacggcgatctgactgttgtctacaacggcaacgtgtttggcgcagctgcaaccagcttggacatgacctctgagctcatcggcctgctggtggctgcggtcgttcttatcgtgaccttcggttcgttcatcgctgccggtatgccgctgatctct

SEQ ID NO: 366 - protein, 242 aa, Corynebacterium glutamicum
VAKFLYKLGSTAYQKKWPFLAVWLVILIGITTLAGLYAKPTSSSFSIPGLDSVTTMEKMQERFPGSDDATSAPTGSVVIQAPEGKTLTDPEVGAEVNQMLDEVRATGVLKDADSVVDPVLAAQGVAAQMTPALEAQGVPAEKIAADIESISPLSADETTGIISMTFDADSAMDISAEDREKVTNILDEYDDGDLTVVYNGNVFGAAATSLDMTSELIGLLVAAVVLIVTFGSFIAAGMPLIS

SEQ ID NO: 367 - DNA, 983 bp, Corynebacterium glutamicum
  CDS (1)..(960): RXS03124
atgactcctaccctggcgtcgatgattggtctggctgtcggtatcgactacgcgctatttatcgtgtcccgtttccgcaatgagttgatttctcagactggcgctaatgatctggagccaaaggaattggctgagcgtctgcgcaccatgccgttggctgctcgtgcgcatgcgatgggaatggctgtgggcactgcgggttctgcggttgtattcgcgggtaccacggtgctgatcgctctggttgctctgtcgatcattaatattccatttctaaccgtgatggccattgctgccgcaatcaccgttgccatcgcagttctggttgctctgtccttcctcccagctctgcttggcctgcttggcactcgcatcttcgcagcacgcgtgcctggacctaaggttccggatcctgaggacgagaagccaacgatgggtctgaagtgggtccgccttgtgcgcaagatgccggtggcttacctgctggttggcgtcgttttgcttggtgcaatcgcaattcctgcgaccaatatgcgcctggccatgccgactgatggcacctccacgctgggcaccgcgccgcgcacggggtatgacatgacggcagatgcgttcggcccgggccgcaacgcgcccatgattgcgcttatcgacgcaaccgacgtccctgaggaagaacgcccattggtgtttggacaggcggtggagcaattcttgaacactgatggtgtgaagaatgctcagatcactcagaccacggagaatttcgataccgcgcagatcctgttaccccagaatttgatgcgatcgatgagcgcacctctgagactctcgcaactcttcgtgcagatgctgagaccttcgctgatgacaccggcgcgacgtatggcattactggcgtcaccccaatttacgatgacatctctgctcgcctcggcgacgtcctggttccttacgttctgatcgttttggttctagcgttc

SEQ ID NO: 368 - protein, 320 aa, Corynebacterium glutamicum
MTPTLASMIGLAVGIDYALFIVSRFRNELISQTGANDLEPKELAERLRTMPLAARAHAMGMAVGTAGSAVVFAGTTVLIALVALSIINIPFLTVMAIAAAITVAIAVLVALSFLPALLGLLGTRIFAARVPGPKVPDPEDEKPTMGLKWVRLVRKMPVAYLLVGVVLLGAIAIPATNMRLAMPTDGTSTLGTAPRTGYDMTADAFGPGRNAPMIALIDATDVPEEERPLVFGQAVEQFLNTDGVKNAQITQTTENFDTAQILLPQNLMRSMSAPLRLSQLFVQMLRPSLMTPARRMALLASPQFTMTSLLASATSWFLTF

SEQ ID NO: 369 - DNA, 271 bp, Corynebacterium glutamicum
  CDS (101)..(271): RXS03125
tgacaccggcgcgacgtatggcattactggcgtcaccccaatttacgatgacatctctgctcgcctcggcgacgtcctggttccttacgttctgatcgttttggttctagcgttcctcgtgctgttgctcgtgttccggtccatttgggtcccattgatcgcggctctgggctttggcttgtcagttctggctacctttggtgctaccgtggcgatcttccaagaaggtgctttcggcatcatcgacgatcctcagccactgctgtgcttc

SEQ ID NO: 370 - protein, 57 aa, Corynebacterium glutamicum
LVLAFLVLLLVFRSIWVPLIAALGFGLSVLATFGATVAIFQEGAFGIIDDPQPLLCF

SEQ ID NO: 371 - DNA, 576 bp, Corynebacterium glutamicum
  CDS (101)..(553): RXA00596
ccgccaccgacggcctcttgaacaccgatgcataccaacaggctgtgctcggtgaaaatgccatcggagtgccaagccctagctaccagggaggaaactaatgcttaacgccctgaaattcatcccatggctgatcggccagattttcctctctggcttcagcgtgatcaccgctgcggtaaaaaaggacaccggcttcaaccccgttgttatccgctacccacttcgagtgaccacggacttccagatcgcagccctgtcaacgtgcatcaccgcgactccttccaccctgtcccttggcctacgcgaaccccgcaagcccggcgaccccaccattttgctgatccaagcagtgtttggttccgatccagtagaagtttttgaatccatcgccgatatggaacaacgcctcgtcccttcggtcgcttcaattgaccacggcgtcccaggccaaggcccttacaaggagatccgccccagcgatgctgagtggccaagtcgcgagatcgctgacaccgcccaaaacaccgtcagccaagacaagagggagttttaaaacaacatgactgcttttgg

SEQ ID NO: 372 - protein, 151 aa, Corynebacterium glutamicum
MLNALKFIPWLIGQIFLSGFSVITAAVKKDTGFNPVVIRYPLRVTTDFQIAALSTCITATPSTLSLGLREPRKPGDPTILLIQAVFGSDPVEVFESIADMEQRLVPSVASIDHGVPGQGPYKEIRPSDAEWPSREIADTAQNTVSQDKREF

SEQ ID NO: 373 - DNA, 738 bp, Corynebacterium glutamicum
  CDS (101)..(715): RXA02079
cggggagccgtgcggacgctgcggaacattaatcatccgggagagtttcatgaaccgcggctcccactactgcccaaactgccagaagcggcgctagctgatgagcgaagcttttgatgcaaccaaagtgcgcaaagctgtgctcaccgtcgcgctgcttaacttcgcttatttctttgtagaattctttattgcattaagcgcaggctccgtttctctactggctgacagtgtcgattttcttgaagacacctccatcaacctgctcattttcattgccctaggatggccgttggcgaggcgcgcagtgatgggcaaacttatggcgattgtgattcttgcacctgctgcttttgctgcgtgggcagcgattcaacggttttccgcaccgcaagcgcccgaagtgtttccgatcatcgtcgcttctctgggcgccgtcgtgatcaacggcgcgagtgccatcattatttctcgagtgcgacaacatggtggctcgcttggccaagctgccttcctatccgcccgaaatgacgtcctgatcaacattgccatcatcatgatggccttaattaccgcatggacgacgtctggatggccagatttgatcctaggttgtttcatcattctgctcgcactgcacgccgctcacgaggtgtgggaagtcagtgaggaagaacgcctcgcctccaaagcccttgctggggaagccatcgattaggggagcagtatgagcttttc

SEQ ID NO: 374 - protein, 205 aa, Corynebacterium glutamicum
MSEAFDATKVRKAVLTVALLNFAYFFVEFFIALSAGSVSLLADSVDFLEDTSINLLIFIALGWPLARRAVMGKLMAIVILAPAAFAAWAAIQRFSAPQAPEVFPIIVASLGAVVINGASAIIISRVRQHGGSLGQAAFLSARNDVLINIAIIMMALITAWTTSGWPDLILGCFIILLALHAAHEVWEVSEEERLASKALAGEAID

SEQ ID NO: 375 - DNA, 1458 bp, Corynebacterium glutamicum
  CDS (101)..(1435): RXA01303
aacatgcgggcgcaggtcagagctgttatcttagtacttatcacagccatagggcgggcttgacggaaagcctttccgcgtaaccatgaagaggcatcacgtgacacaactcaacaccaaaggcgttgttctgcaagggtgggatccagaagatcctgaacattgggactcgaaaattgcatggcgaaccctgtggattaccaccttctccatgattattgggttctgcgtgtggtatttggtttctgccatcgctcccctactcaatcgaattggatttgatctctcagcaggtcagctttattggctcgcatctatccccggtttggccggcggattaatccgattgatttacatgttccttccaccgattcttggaacccgcaaattggtcggaatttcctccggtctatttttgatccccatgtttgggtggttcctggctgtccaagattcaagcactccctactggtggcttctcacactcgctgcactcactggcattggtggtggcgtgttctctggatatatgccgtccacgggatacttcttccccaaggcaaaatcgggcactgcgctgggcattcaggcaggtatcggcaacctcggcgtctcgataattcagttcatgggcccatgggtcatgggtttcggtctgctgggcattggtttcctcaccccgcagcgcaccattgaaggcaccacggtgtttgtgcacaatgctgcgattgtgttggtcccgtggactattctcgcggccgttttatccttcctgtttcttaaagatgtcccagtcaccgcaaatttccggcaacagatcgatatctttggcaacaagaacacatggattttgtccattatctacttgatgacattcggtgccttcgccggtttcgccgcgcagttcggtctgatcatcaacaacaacttcggcatcgcttccccgatggcagagacttatccagctgagatgcttcacgccggtgctacgttcgcgtttcttggacctttgattggtgctttggtgcgtgctgcatggggtccactgtgtgacagattcggtggagctatctggacctttgtcggtggcatcggaatgactatcgccactgcagctgccgcaatcttcctaagcagagcggagacacctgatgatttctggccattcctgtggtccatgcttgccctgttcttcttcaccggtctgggcaatgctggcaccttcaaacaaatgcccatgattttgcctaaacgccaagcaggtggcgtgatcggctggaccggtgccattggtgccttcggccccttcattgtcggtgtcttgctctccttcactccaactgtcgcgttcttctggggctgcgtggtgttcttcatcatcgccaccgctttgacctggatctactacgcccgcccgaacgctccattcccgggataaaccgaaaggccaatccatga

SEQ ID NO: 376 - protein, 445 aa, Corynebacterium glutamicum
VTQLNTKGVVLQGWDPEDPEHWDSKIAWRTLWITTFSMIIGFCVWYLVSAIAPLLNRIGFDLSAGQLYWLASIPGLAGGLIRLIYMFLPPILGTRKLVGISSGLFLIPMFGWFLAVQDSSTPYWWLLTLAALTGIGGGVFSGYMPSTGYFFPKAKSGTALGIQAGIGNLGVSIIQFMGPWVMGFGLLGIGFLTPQRTIEGTTVFVHNAAIVLVPWTILAAVLSFLFLKDVPVTANFRQQIDIFGNKNTWILSIIYLMTFGAFAGFAAQFGLIINNNFGIASPMAETYPAEMLHAGATFAFLGPLIGALVRAAWGPLCDRFGGAIWTFVGGIGMTIATAAAAIFLSRAETPDDFWPFLWSMLALFFFTGLGNAGTFKQMPMILPKRQAGGVIGWTGAIGAFGPFIVGVLLSFTPTVAFFWGCVVFFIIATALTWIYYARPNAPFPG

SEQ ID NO: 377 - DNA, 738 bp, Corynebacterium glutamicum; identical to SEQ ID NO: 373
  CDS (101)..(715): RXA02079

SEQ ID NO: 378 - protein, 205 aa, Corynebacterium glutamicum; identical to SEQ ID NO: 374

SEQ ID NO: 379 - DNA, 1173 bp, Corynebacterium glutamicum
  CDS (101)..(1150): RXN00832
gagattgtgctaggttctgatgaggcttcgggacgacccgaagaaatctatgacagcctgggaacggcccagagttcttaagaaagtttgactagagaacatgccgttttcttggctaaaaccaattgattatgcccgcatctttgtcggctgggcatcgatttttatcatccccctcatcacactgccatcaattattgagttggcgctgatcgtggcagtcatcctattctgcgcatttggcgtggtgaagatggcggagcgtttggctcatattttgggtgatccttttggatcgttgatccttaccttgtcgatcgtgatcattgaagtgattttgatctgtgcggtgatgctggggcctgctgattcaaccactgctggtcgggattccgtgatggcagtgtccatgatcatcatgggtttggtcgtgggattgtgcctactcattggtggtttaaggcatggaagcatgccacacaatggggtgggaactccgacctacttggtgctgatcgcaactttttccgtaatcgcctttgcggttccagctttcaggggagaatactccactgggcaggcacttgttatttcaacactgacagcagtggtgtacgggttcttcctgtttcgccaaatgggtgcccaagctggtgaatttcaagaggtcgaggtcgcagaaaaggcagacgacgcagcaaaatgggaggtcccatttagaggcttaatcttgattatcactgtgctccccatcgtgttgctgtcccatgacatggccacggtgatggatgaagtcctggcaagccttggtgcacccgtagcaatggctggattaattattgccaccattgtcttcttgccagagaccatcacctccttgaaagctgcgtggacaggagagattcagcgagtaagcaacctcgcgcatggagcccaagtatcaacggtggggctgacaatcccagctgttctagtgatcggcgtgatcacaggtcaagatgtagttttgggggagaccccgatcaacttgttgctgctgggaaccaccattgcggtgacagccattgcgtttagctccaagaaagtcagtgctgtgcatggctcggtgctgctcatgcttttcggtgtttacatgatgagcatgttcgcctgatttaggtagcctggtgggaa

SEQ ID NO: 380 - protein, 350 aa, Corynebacterium glutamicum
MPFSWLKPIDYARIFVGWASIFIIPLITLPSIIELALIVAVILFCAFGVVKMAERLAHILGDPFGSLILTLSIVIIEVILICAVMLGPADSTTAGRDSVMAVSMIIMGLVVGLCLLIGGLRHGSMPHNGVGTPTYLVLIATFSVIAFAVPAFRGEYSTGQALVISTLTAVVYGFFLFRQMGAQAGEFQEVEVAEKADDAAKWEVPFRGLILIITVLPIVLLSHDMATVMDEVLASLGAPVAMAGLIIATIVFLPETITSLKAAWTGEIQRVSNLAHGAQVSTVGLTIPAVLVIGVITGQDVVLGETPINLLLLGTTIAVTAIAFSSKKVSAVHGSVLLMLFGVYMMSMFA

SEQ ID NO: 381 - DNA, 578 bp, Corynebacterium glutamicum
  CDS (1)..(555): FRXA00832
acactgacagcagtggtgtacgggttcttcctgtttcgccaaatgggtgcccaagctggtgaatttcaagaggtcgaggtcgcagaaaaggcagacgacgcagcaaaatgggaggtcccatttagaggcttaatcttgattatcactgtgctccccatcgtgttgctgtcccatgacatggccacggtgatggatgaagtcctggcaagccttggtgcacccgtagcaatggctggattaattattgccaccattgtcttcttgccagagaccatcacctccttgaaagctgcgtggacaggagagattcagcgagtaagcaacctcgcgcatggagcccaagtatcaacggtggggctgacaatcccagctgttctagtgatcggcgtgatcacaggtcaagatgtagttttgggggagaccccgatcaacttgttgctgctgggaaccaccattgcggtgacagccattgcgtttagctccaagaaagtcagtgctgtgcatggctcggtgctgctcatgcttttcggtgtttacatgatgagcatgttcgcctgatttaggtagcctggtgggaa

SEQ ID NO: 382 - protein, 185 aa, Corynebacterium glutamicum
TLTAVVYGFFLFRQMGAQAGEFQEVEVAEKADDAAKWEVPFRGLILIITVLPIVLLSHDMATVMDEVLASLGAPVAMAGLIIATIVFLPETITSLKAAWTGEIQRVSNLAHGAQVSTVGLTIPAVLVIGVITGQDVVLGETPINLLLLGTTIAVTAIAFSSKKVSAVHGSVLLMLFGVYMMSMFA

SEQ ID NO: 383 - DNA, 2733 bp, Corynebacterium glutamicum
  CDS (101)..(2710): RXN00378
accgtgagccttatactgtgaggacattaaaagtgacacctctttttctatcttttacaacccaagaaggtttatcgtgagcacaccggattcttcctcggtggacaaggccgtaaacactgctatctctgacgccaaaacagcggcgctcaaggcaggtgttggattgaaccgagccaccgcctcagaagaagaggaagatttaagctcaagcattaaggtttctttggcctttgagctcgaggggttaagcaatgcaccatcgttgatggtggtggaaaaagccctagagaagatccccggtgtatccgcggatctgatttacccttcacaaactgcatggattacagcaactgatcgggtacatcccgaaaccctcattgaggtgtttgagcagttcggcatcaaagcacacctttctaattcatcgctgctgcgcaggcatcaacagctcagcgcggaagtaaatagggaagcacgccttgatcgttaccgctcccgaatggatgccaagcgaatctcgcctcgtgtgcgaaggcataaccgacaagaaatggtacatgcggtacgcgctcgtgaaagtggttggattaaacgcaggaatcacaccacctcgcagcatgaagacccaatgtcgggcgatgtgctgttcaccgcccgcgcactgattacacctaagcgtttgtgggtgtcgttgccgtttgcgctcatcgtattggcgttatcgttgaatccttcgtggcagtttgattattggcagtggttgtccgctgtgttggctattcctgtggtggtgtggggtgcctggccgtttcaccgcgctgcagcaggcggtattcgtcgaggaatttccgctcttgatgcgaccagctcaatcgctattgctgctgcatacgcgtggtctatcgccatgctgttgtttgaaaccccaggaggtaaatcctggcggtcatatccgtcctggttcgcttttgaccacggcacgttgacccaaaacgagatttattttgatgtggcctgcggaatcaccgtgttgcttcttgccggacggctgctgacaaggcgtcgaagccaatccagtttgttagcggaacttggtcgcctccaaatcgatccacagcgcattgtcactgtggtgcgtaaacaccgattgaagcgcgtagtccaggaactgaacattccagtgcaggaagtccgtgtcaatgacgatgtgaaagttccacctaataccacgatccctgtggatggcactgtcatcggtggcggttcgcggatcgcagctagcatcatcatgggacaagaccagcgtgatgtaaaagtaaatgacaaagttttcgccggcagcctcaacctcgaatccgaaatcaaggttcgtgttattcgcactggtcaccgcacccgcatcgccgcggtacataggtgggttaaagaagcgacgttgaaggaaaaccgccacaatagggcagcgatccgttcggccggtaaccttgtgcccatcacgttcacccttgctgtggtggacttctgtctgtgggcactgatctctggaaacatcaacgctgcatttaccactaccttggctgtccttgcgtgcgtggctccggtggccttagcgttgtctgctccacttgccacgaggaattccatcgaagctgcagcacgacacggtattttggtccgctctggtgaaattttccgagttctcgatgatgtggatactgccgtatttaatcgtgtgggcacactaaccgatggcgaaatgacagtggaaaccgtcacagcagacaaaggcgaggacccagaactagtgctgcgtgtcgccggggcgttggccatggaatcccaccacgcgatttccaaagcactggtgaaagcatcccgtgaagctcgtgataccggcgccggtggtgaagatgtcccacactggattgaagtaggcaacgtggaaatcaccgaagccggctcattccaagcaaccatcgagctgccactgatcaaaccatctggcgaaaaaatcatgcgcaccacagaagcactcctgtggcgaccacgatccatgacagaagtccgtgagcacttaagcccccgactagtggcagcagcaacctcaggtggcgcaccactgatcgtgcgatggaaaggcaaagaccgcggagttatcactctaagtgaccacgtgagatcagattcctccgatgcgattattgcgattgaagaacaaggcatcgagaccatgatgctttcacgtgatacttacccggtggcacgtcgatacgcagacagcttaggcatcacccacgtcttggccggcatcgcgccgggcaagaaagcccaggtcgtccgtgcagtccacacccgcggatccactgtcgcgatgatcggcgatgaatcagtaatggactgtttgaaagtcgctgacgtgggtgtactgatgggcgtcgatcgtccctcagatctgcgtgatgattccgatgacccggcagctgacgttgtggtcatgcgcgaagaggtcatgagcgtgccgacgctgtttaaactggctcgacgctacgccaagttggtcaatggcaatattgctctggcctggatctataacggtgttgccatggtgcttgcagtgtctggcttgctgcatccaatggctgcgaccgtggctatgctggcgtcttcgctgcttattgaatggcgctcgggcagggcgcgcaagtactaaccagcaattcccaagcccaa

SEQ ID NO: 384 - protein, 870 aa, Corynebacterium glutamicum
VDKAVNTAISDAKTAALKAGVGLNRATASEEEEDLSSSIKVSLAFELEGLSNAPSLMVVEKALEKIPGVSADLIYPSQTAWITATDRVHPETLIEVFEQFGIKAHLSNSSLLRRHQQLSAEVNREARLDRYRSRMDAKRISPRVRRHNRQEMVHAVRARESGWIKRRNHTTSQHEDPMSGDVLFTARALITPKRLWVSLPFALIVLALSLNPSWQFDYWQWLSAVLAIPVVVWGAWPFHRAAAGGIRRGISALDATSSIAIAAAYAWSIAMLLFETPGGKSWRSYPSWFAFDHGTLTQNEIYFDVACGITVLLLAGRLLTRRRSQSSLLAELGRLQIDPQRIVTVVRKHRLKRVVQELNIPVQEVRVNDDVKVPPNTTIPVDGTVIGGGSRIAASIIMGQDQRDVKVNDKVFAGSLNLESEIKVRVIRTGHRTRIAAVHRWVKEATLKENRHNRAAIRSAGNLVPITFTLAVVDFCLWALISGNINAAFTTTLAVLACVAPVALALSAPLATRNSIEAAARHGILVRSGEIFRVLDDVDTAVFNRVGTLTDGEMTVETVTADKGEDPELVLRVAGALAMESHHAISKALVKASREARDTGAGGEDVPHWIEVGNVEITEAGSFQATIELPLIKPSGEKIMRTTEALLWRPRSMTEVREHLSPRLVAAATSGGAPLIVRWKGKDRGVITLSDHVRSDSSDAIIAIEEQGIETMMLSRDTYPVARRYADSLGITHVLAGIAPGKKAQVVRAVHTRGSTVAMIGDESVMDCLKVADVGVLMGVDRPSDLRDDSDDPAADVVVMREEVMSVPTLFKLARRYAKLVNGNIALAWIYNGVAMVLAVSGLLHPMAATVAMLASSLLIEWRSGRARKY

SEQ ID NO: 385 - DNA, 1796 bp, Corynebacterium glutamicum
  CDS (1)..(1773): FRXA00378
aaatcctggcggtcatatccgtcctggttcgcttttgaccacggcacgttgacccaaaacgagatttattttgatgtggcctgcggaatcaccgtgttgcttcttgccggacggctgctgacaaggcgtcgaagccaatccagtttgttagcggaacttggtcgcctccaaatcgatccacagcgcattgtcactgtggtgcgtaaacaccgattgaagcgcgtagtccaggaactgaacattccagtgcaggaagtccgtgtcaatgacgatgtgaaagttccacctaataccacgatccctgtggatggcactgtcatcggtggcggttcgcggatcgcagctagcatcatcatgggacaagaccagcgtgatgtaaaagtaaatgacaaagttttcgccggcagcctcaacctcgaatccgaaatcaaggttcgtgttattcgcactggtcaccgcacccgcatcgccgcggtacataggtgggttaaagaagcgacgttgaaggaaaaccgccacaatagggcagcgatccgttcggccggtaaccttgtgcccatcacgttcacccttgctgtggtggacttctgtctgtgggcactgatctctggaaacatcaacgctgcatttaccactaccttggctgtccttgcgtgcgtggctccggtggccttagcgttgtctgctccacttgccacgaggaattccatcgaagctgcagcacgacacggtattttggtccgctctggtgaaattttccgagttctcgatgatgtggatactgccgtatttaatcgtgtgggcacactaaccgatggcgaaatgacagtggaaaccgtcacagcagacaaaggcgaggacccagaactagtgctgcgtgtcgccggggcgttggccatggaatcccaccacgcgatttccaaagcactggtgaaagcatcccgtgaagctcgtgataccggcgccggtggtgaagatgtcccacactggattgaagtaggcaacgtggaaatcaccgaagccggctcattccaagcaaccatcgagctgccactgatcaaaccatctggcgaaaaaatcatgcgcaccacagaagcactcctgtggcgaccacgatccatgacagaagtccgtgagcacttaagcccccgactagtggcagcagcaacctcaggtggcgcaccactgatcgtgcgatggaaaggcaaagaccgcggagttatcactctaagtgaccacgtgagatcagattcctccgatgcgattattgcgattgaagaacaaggcatcgagaccatgatgctttcacgtgatacttacccggtggcacgtcgatacgcagacagcttaggcatcacccacgtcttggccggcatcgcgccgggcaagaaagcccaggtcgtccgtgcagtccacacccgcggatccactgtcgcgatgatcggcgatgaatcagtaatggactgtttgaaagtcgctgacgtgggtgtactgatgggcgtcgatcgtccctcagatctgcgtgatgattccgatgacccggcagctgacgttgtggtcatgcgcgaagaggtcatgagcgtgccgacgctgtttaaactggctcgacgctacgccaagttggtcaatggcaatattgctctggcctggatctataacggtgttgccatggtgcttgcagtgtctggcttgctgcatccaatggctgcgaccgtggctatgctggcgtcttcgctgcttattgaatggcgctcgggcagggcgcgcaagtactaaccagcaattcccaagcccaa

SEQ ID NO: 386 - protein, 591 aa, Corynebacterium glutamicum
KSWRSYPSWFAFDHGTLTQNEIYFDVACGITVLLLAGRLLTRRRSQSSLLAELGRLQIDPQRIVTVVRKHRLKRVVQELNIPVQEVRVNDDVKVPPNTTIPVDGTVIGGGSRIAASIIMGQDQRDVKVNDKVFAGSLNLESEIKVRVIRTGHRTRIAAVHRWVKEATLKENRHNRAAIRSAGNLVPITFTLAVVDFCLWALISGNINAAFTTTLAVLACVAPVALALSAPLATRNSIEAAARHGILVRSGEIFRVLDDVDTAVFNRVGTLTDGEMTVETVTADKGEDPELVLRVAGALAMESHHAISKALVKASREARDTGAGGEDVPHWIEVGNVEITEAGSFQATIELPLIKPSGEKIMRTTEALLWRPRSMTEVREHLSPRLVAAATSGGAPLIVRWKGKDRGVITLSDHVRSDSSDAIIAIEEQGIETMMLSRDTYPVARRYADSLGITHVLAGIAPGKKAQVVRAVHTRGSTVAMIGDESVMDCLKVADVGVLMGVDRPSDLRDDSDDPAADVVVMREEVMSVPTLFKLARRYAKLVNGNIALAWIYNGVAMVLAVSGLLHPMAATVAMLASSLLIEWRSGRARKY

SEQ ID NO: 387 - DNA, 327 bp, Corynebacterium glutamicum
  CDS (101)..(304): RXA00942
cattgaccggcagctcgtctgattcactgcacatcgtacattggacggtggacacgtttcagagtccgctggatttcatcacatcggaaggaagagaattttgagtaccaaaaattaccacgtcgagggtttgacctgcgcaaacggtgtagcttccgtagaggatgaaatcggcattgttgcgggcacccagggtgtggatattgatattgagaccggccgcgtcacggtgactggtgaaggtttcactgacgaggaaatcattgaggctgtcgcgaacgcgggctacaaagtttctgggcggtagcacaattacacattcatctc

SEQ ID NO: 388 - protein, 68 aa, Corynebacterium glutamicum
LSTKNYHVEGLTCANGVASVEDEIGIVAGTQGVDIDIETGRVTVTGEGFTDEEIIEAVANAGYKVSGR

SEQ ID NO: 389 - DNA, 1925 bp, Corynebacterium glutamicum
  CDS (1)..(1902): RXN01338
aaaacttataccccaaatccctggatgttattcatccgctcatttgatggcatcatcactgtcgcagcccttgttgccatcgcaatacatctcattttatggctggctctagatctagatggccttgctaaaaactggcctttaatagccatcgttatcgtaggtggcattccgttgatgtgggatgtgctgaaatcagccattaaaactcgcggtggcgcggatactttagcagcagtctccatcattacttctgtgttgttaggggagtggttggttgccgcgatcatcgtgctcatgctctctggtggtgaagcgctagaagaggcagcatcacggcgagccagtggcaccttggacgcacttgcccggcgcgcaccaagtacagctcaccgcctgttgggtgcaaccattcttgatggaaccgaagagatcgccgtggaagagatcacggttggtgatttagtggcggtgctcccgcatgaactttgtcccgtggatggtgaaatcgtggcaggccacggcaccatggatgagtcttatctcacgggtgagccctatgtggtgagtaaatctaaaggttcgcaagcaatgtcgggtgcagtcaatggtgatactccgctgacgattgttgccacaaagcttgcccatgattccagatacgcccaaattgttggtgtactccatgaagcagaaaacaaccgcccagaaatgcgcaggatggctgaccgtcttggcgcgtggtatacggtgattgcacttgccctcggtggtcttggctggattgtctccggcgacccagtgaggttcttggctgttgtcgttgtcgccaccccatgtccattgctcattgcagtgccagtggcgatcatcggtgcgatttctcttgcggctcgtcggggcatcatcgtgaagaaccctggaatgctggaaaacgcttcaggagtaaagacagtgatgttcgataagactggaacgctcacctatggcaggccagtgattactgatatccacactgctcccggagttgaggaagatacagtcctagctttggctgcttcagtagagcgctactccagacacccgttggctgacgcgattcgtgagggcgcaaaagccagggaacttcatctgcctgatgtagtggaagtatcggaacgtccaggacagggactaaccggcacggtgggcgagcacctggttcgaataaccaataggcgcagcacactagaaattgatccagacagcaagaactacattccggtgacaagttccggcatggaatctgtggtgcttgttgatgataaatatgcagcactcattcgcctccgggatgaacctcgtgcatctgccagtgagttcatcgcgcacttgcccaagaagcacaaagtggacaagctcatgattatctctggtgatcgcgcatctgaggttcgttaccttgcggacaaggttggcattgatgaggtacacgcagaggcctcaccggaagacaagctgaacattgttaatcggcataatgagcacggcgccaccatgttcttaggtgatggaatcaacgatgcgccagccatggccgttgccaccgttggtgtcgcgatgggagcagactccgatgtcacgtccgaagcagcagatgctgtgattttggattcttccctggaacgtctcgacgatctgctccacatcagtgcacggatgcgtcgaatagcgttgcaatctgcgggcggtggcatggcgttgagtgtcataggaatgatcctcgcggtatttggattcttgacgccactgatgggtgcgatcttccaagaggtcattgacgtgctggctatcctcaattccgctcgggtcgcactgccacgcggagcgattagtgattttgatacgcaagaaaaagtttcttagcagggtaacctaaatgtcgt

SEQ ID NO: 390 - protein, 634 aa, Corynebacterium glutamicum
KTYTPNPWMLFIRSFDGIITVAALVAIAIHLILWLALDLDGLAKNWPLIAIVIVGGIPLMWDVLKSAIKTRGGADTLAAVSIITSVLLGEWLVAAIIVLMLSGGEALEEAASRRASGTLDALARRAPSTAHRLLGATILDGTEEIAVEEITVGDLVAVLPHELCPVDGEIVAGHGTMDESYLTGEPYVVSKSKGSQAMSGAVNGDTPLTIVATKLAHDSRYAQIVGVLHEAENNRPEMRRMADRLGAWYTVIALALGGLGWIVSGDPVRFLAVVVVATPCPLLIAVPVAIIGAISLAARRGIIVKNPGMLENASGVKTVMFDKTGTLTYGRPVITDIHTAPGVEEDTVLALAASVERYSRHPLADAIREGAKARELHLPDVVEVSERPGQGLTGTVGEHLVRITNRRSTLEIDPDSKNYIPVTSSGMESVVLVDDKYAALIRLRDEPRASASEFIAHLPKKHKVDKLMIISGDRASEVRYLADKVGIDEVHAEASPEDKLNIVNRHNEHGATMFLGDGINDAPAMAVATVGVAMGADSDVTSEAADAVILDSSLERLDDLLHISARMRRIALQSAGGGMALSVIGMILAVFGFLTPLMGAIFQEVIDVLAILNSARVALPRGAISDFDTQEKVS

SEQ ID NO: 391 - DNA, 2001 bp, Corynebacterium glutamicum
  CDS (101)..(1978): FRXA01338
atccttgccttgccaagggaagcctgtacatgctggtcagggacatttttatgggtgataatggggtttatgaataaaaacttataccccaaatccctggatgttattcatccgctcatttgatggcatcatcactgtcgcagcccttgttgccatcgcaatacatctcattttatggctggctctagatctagatggccttgctaaaaactggcctttaatagccatcgttatcgtaggtggcattccgttgatgtgggatgtgctgaaatcagccattaaaactcgcggtggcgcggatactttagcagcagtctccatcattacttctgtgttgttaggggagtggttggttgccgcgatcatcgtgctcatgctctctggtggtgaagcgctagaagaggcagcatcacggcgagccagtggcaccttggacgcacttgcccggcgcgcaccaagtacagctcaccgcctgttgggtgcaaccattcttgatggaaccgaagagatcgccgtggaagagatcacggttggtgatttagtggcggtgctcccgcatgaactttgtcccgtggatggtgaaatcgtggcaggccacggcaccatggatgagtcttatctcacgggtgagccctatgtggtgagtaaatctaaaggttcgcaagcaatgtcgggtgcagtcaatggtgatactccgctgacgattgttgccacaaagcttgcccatgattccagatacgcccaaattgttggtgtactccatgaagcagaaaacaaccgcccagaaatgcgcaggatggctgaccgtcttggcgcgtggtatacggtgattgcacttgccctcggtggtcttggctggattgtctccggcgacccagtgaggttcttggctgttgtcgttgtcgccaccccatgtccattgctcattgcagtgccagtggcgatcatcggtgcgatttctcttgcggctcgtcggggcatcatcgtgaagaaccctggaatgctggaaaacgcttcaggagtaaagacagtgatgttcgataagactggaacgctcacctatggcaggccagtgattactgatatccacactgctcccggagttgaggaagatacagtcctagctttggctgcttcagtagagcgctactccagacacccgttggctgacgcgattcgtgagggcgcaaaagccagggaacttcatctgcctgatgtagtggaagtatcggaacgtccaggacagggactaaccggcacggtgggcgagcacctggttcgaataaccaataggcgcagcacactagaaattgatccagacagcaagaactacattccggtgacaagttccggcatggaatctgtggtgcttgttgatgataaatatgcagcactcattcgcctccgggatgaacctcgtgcatctgccagtgagttcatcgcgcacttgcccaagaagcacaaagtggacaagctcatgattatctctggtgatcgcgcatctgaggttcgttaccttgcggacaaggttggcattgatgaggtacacgcagaggcctcaccggaagacaagctgaacattgttaatcggcataatgagcacggcgccaccatgttcttaggtgatggaatcaacgatgcgccagccatggccgttgccaccgttggtgtcgcgatgggagcagactccgatgtcacgtccgaagcagcagatgctgtgattttggattcttccctggaacgtctcgacgatctgctccacatcagtgcacggatgcgtcgaatagcgttgcaatctgcgggcggtggcatggcgttgagtgtcataggaatgatcctcgcggtatttggattcttgacgccactgatgggtgcgatcttccaagaggtcattgacgtgctggctatcctcaattccgctcgggtcgcactgccacgcggagcgattagtgattttgatacgcaagaaaaagtttcttagcagggtaacctaaatgtcgt

SEQ ID NO: 392 - protein, 626 aa, Corynebacterium glutamicum
MLFIRSFDGIITVAALVAIAIHLILWLALDLDGLAKNWPLIAIVIVGGIPLMWDVLKSAIKTRGGADTLAAVSIITSVLLGEWLVAAIIVLMLSGGEALEEAASRRASGTLDALARRAPSTAHRLLGATILDGTEEIAVEEITVGDLVAVLPHELCPVDGEIVAGHGTMDESYLTGEPYVVSKSKGSQAMSGAVNGDTPLTIVATKLAHDSRYAQIVGVLHEAENNRPEMRRMADRLGAWYTVIALALGGLGWIVSGDPVRFLAVVVVATPCPLLIAVPVAIIGAISLAARRGIIVKNPGMLENASGVKTVMFDKTGTLTYGRPVITDIHTAPGVEEDTVLALAASVERYSRHPLADAIREGAKARELHLPDVVEVSERPGQGLTGTVGEHLVRITNRRSTLEIDPDSKNYIPVTSSGMESVVLVDDKYAALIRLRDEPRASASEFIAHLPKKHKVDKLMIISGDRASEVRYLADKVGIDEVHAEASPEDKLNIVNRHNEHGATMFLGDGINDAPAMAVATVGVAMGADSDVTSEAADAVILDSSLERLDDLLHISARMRRIALQSAGGGMALSVIGMILAVFGFLTPLMGAIFQEVIDVLAILNSARVALPRGAISDFDTQEKVS

SEQ ID NO: 393 - DNA, 324 bp, Corynebacterium glutamicum
  CDS (101)..(301): RXA01625
gggagcgaagttccctgggttaaattaaccacttgcagtataccctagtggggtatattgtctgctgttagaagatacccgacagaaaggggccaataatatggctatcaagaactacaccgtcgaaggcatgacttgtggacactgcgtctcctccgtaaaggaagaggtcggagaggttgctggcgtcaccgctgtggacgtcaccctagaaaccggtgccgtgcaggttaccggcgaagacttcaccgacgaggctgtcaaggctgctgtcgttgaggctggctacaaggttgttgcataaacccctgaaaagtttaaagc

SEQ ID NO: 394 - protein, 67 aa, Corynebacterium glutamicum
MAIKNYTVEGMTCGHCVSSVKEEVGEVAGVTAVDVTLETGAVQVTGEDFTDEAVKAAVVEAGYKVVA

SEQ ID NO: 395 - DNA, 2799 bp, Corynebacterium glutamicum
  CDS (101)..(2776): RXA02220
gggctttcgccgcggaatggtccctcgtccaggtctttaattgatgtcttgacgtgatctgggcgggcacgcggccaatcatgtgaaaggtctgttttaggtgtcgtcccctctccccgctgccgtcacatcaaaacccgcccacgcgctttcctctgatgaggtgttagaaaatctcggggtccaggacaccggattgacctccgcggaggcaacacagcgtttggaagcaaacgggccaaacgagcttcctcaaactccacctgaaacagtctggcaacggctattccgccaggtcaacgatccaatgatctacgttctcattgccgccgcggtactcacggcgtttcttgggcattggacagacaccatcgtgatcggcgccgttgtcatcatcaacatgatggttgggttcatccaagagggcaaagctgcggatgcgttggcatcgatccgcaacatgctctccccggaatccgcggcgttgcgcgatggggtcttccacaaaattgatgcggcagagctggtggtcggtgacgttgtgaaactatccgccggcgataaagtgcccgctgacctgcgcatgctcgccgccaccaatctgcacattgaggaatccgcgctcaccggcgaggcggaagcagtggtcaaaggtactgatccagttgaggccgacgccggaatcggcgaccgcacatccatggcgttttcaggaacgctggtgctcacaggcagcggcaccggcgtggtcaccgccaccggtgcaggcacagaaatcgggcacatcaccaccatgcttgccgacgtcgactccgtggataccccattgactcggtcgatgaaaaagttctcatcggcgttagcaatcgtgtgtgtattcctagcgatcctcatgctggtggttgccggtctagtccaccacacacctttggaagagctcattctttccgccatcggctttgcggtggctgccattccggagggtctacctgcggttatcgccatcacgctggcattgggtgtgcaaaagatggcagctcgaaatgcgattacgcgccggttgaattccgtggaaacacttggctctgtcaccaccatctgcacggataaaaccggcacactcacccgcaatgagatgacagtccgcgcaatcgccaccggtacgagtctttatgacgtcagtggagcaggctacgaacctctcggggaaatccgcttaaaagacggcgagcaagtatccaagcaggatttcccagatctctacgccatggcgttggtcgcagcgaacgtcaacgacgccgaaatttaccaagaagacggcatgtggaggctttccggcgaacccaccgacggcggtattcgtgcctttgcaatgaaaaccaacgctgaaatcttgacccgaacagccgaagtccccttcgattccgcatacaaatacatggcgacgcttcacaccatcgatggagcaaacaccatgctggtcaagggcgctcccgatcgtttattggatagaagtgcacagcagcgcaacggtgaaccacttgaccggccgtattgggaacagctcatcgaggacctcgcgtcccaaggcctccgcgtgctggctgcggcatataaagagcttccccacagcacgtcaacaattactccagaagatgttgaccagggcgaactcaccttcctcgggctctacggcatcatggatccgccacgcgaagaagtcatcgaagccatgaaagtggtgcaatcggcaggcgttcgcgtccgcatgatcaccggcgatcactcctccacggcccgcgcaatcgcccgcgaagtgggaatccgcggccagaacgtgctcaccggtgcggaaattactgcggctactgatgaggagctgcagggactcgtcgataatgctgatctttttgtgcgcaccagccccgagcacaagctgcgcgtcgtgcgcgcactgcaagctaacggcgaagtcgcgtccatgaccggcgacggcgtcaacgatgcgccagcgctaaaacaagccgacgtcggcgtcgccatgggcattaagggcaccgaagccaccaaagacgcggccgacatcgtgcttgccgacgacaatttcgccacaatcgccggcgccgtagaaatgggtcgcaccatctacgacaacctgcgcaaagccgtcgtcttcatgctccccaccaacggcgcccaaggcctcgtcattttcatcgcgatgctgctcggctgggaactgcccatcaccgcacttcaagtgctgtggatcaacctcatcaccgccatcacactgtccctggcgctgtccttcgagccggccgagcccggcatcatgaacagaaaacccagaaaccccaagagcgggcttatcgacgccccctccgtgcttcgcatcgtctatgtctccctgctgctcggcggagcaacgttctgggctttccttggcgcccgcgacgcaggaatcgacatcgacaccgcccgcaccatcgcggtcaccacccttgcagtcagccaagtgttctaccttttaagctcccgatacttcgaagtatccgcgctgcgaaaagaactcttcaccaccaacccgatttcctggctgtgcatcgcactcatgctgatcctgcaactggcctttgtctacctgccgttcatgcaaagcaccttcgacaccgccgcactgacgcttagagattgggtcatgccactggtgtttggtgttgttgtctttgcggtcgttgaaaccgagaaattcatcaggcgccttaaagcgtcttaaggtttcagcccctcaagata

SEQ ID NO: 396 - protein, 892 aa, Corynebacterium glutamicum
VSSPLPAAVTSKPAHALSSDEVLENLGVQDTGLTSAEATQRLEANGPNELPQTPPETVWQRLFRQVNDPMIYVLIAAAVLTAFLGHWTDTIVIGAVVIINMMVGFIQEGKAADALASIRNMLSPESAALRDGVFHKIDAAELVVGDVVKLSAGDKVPADLRMLAATNLHIEESALTGEAEAVVKGTDPVEADAGIGDRTSMAFSGTLVLTGSGTGVVTATGAGTEIGHITTMLADVDSVDTPLTRSMKKFSSALAIVCVFLAILMLVVAGLVHHTPLEELILSAIGFAVAAIPEGLPAVIAITLALGVQKMAARNAITRRLNSVETLGSVTTICTDKTGTLTRNEMTVRAIATGTSLYDVSGAGYEPLGEIRLKDGEQVSKQDFPDLYAMALVAANVNDAEIYQEDGMWRLSGEPTDGGIRAFAMKTNAEILTRTAEVPFDSAYKYMATLHTIDGANTMLVKGAPDRLLDRSAQQRNGEPLDRPYWEQLIEDLASQGLRVLAAAYKELPHSTSTITPEDVDQGELTFLGLYGIMDPPREEVIEAMKVVQSAGVRVRMITGDHSSTARAIAREVGIRGQNVLTGAEITAATDEELQGLVDNADLFVRTSPEHKLRVVRALQANGEVASMTGDGVNDAPALKQADVGVAMGIKGTEATKDAADIVLADDNFATIAGAVEMGRTIYDNLRKAVVFMLPTNGAQGLVIFIAMLLGWELPITALQVLWINLITAITLSLALSFEPAEPGIMNRKPRNPKSGLIDAPSVLRIVYVSLLLGGATFWAFLGARDAGIDIDTARTIAVTTLAVSQVFYLLSSRYFEVSALRKELFTTNPISWLCIALMLILQLAFVYLPFMQSTFDTAALTLRDWVMPLVFGVVVFAVVETEKFIRRLKAS

SEQ ID NO: 397 - DNA, 1917 bp, Corynebacterium glutamicum
  CDS (101)..(1894): RXN00980
agagagaaagggagaaatcatgaaaacgtggaagacctggggggtcgtcggagcttcaggcctcttgattattttgtcgtggttgagttcatcgagcccgatgctggcagatgcattcatgatcgcggctgcaattgttgcaggttggccgatcgcgcagtctgcatatcaagcacttcgcattcgaatggtgtcgattgacttactggtcgttgtggctgccgttggtgccatgttcatcaacaactattgggagtctgcggcggtgacgttcctctttgcccttggcaaggcactggaacgcgcgacaatgaaccgcacacgaaaagcactatcggatctggtggatgcagctccagaaactgcaacaaggctcaacgcggatgactcaacagaggtagttgagctgtgggagcttgagcccggtgacatcgtcttggtacgcaatggcgaacaaattcccgtcgatggaaacgtgattgcgggtgtcggtggaattgatgaatccaacatcacgggtgaatcaatgccggctgaaaagggtcaaggctctgatgtgtatgcaggaacctggctgcgatctggtgttttgagagtcgaggcaacaggaattggttcagactcaactttggcaaaaatcattcaccgcgttgaagacgcccaggatgacaaagcccgcacacaaacattcttagagaaattctctaagtggtacaccccgggcgtcatgatcgccgccgcagtggtgggacttatcacctgggacgtagaactagcactgacgctcttagtgatcggctgccccggcgcgttggttatctccatcccggtgtccatcgtcgcaggcatcggccgtgctgcacgcgatggcgtgctgatcaagggtggagaatacctagaaaccgccgcgaaagtcgacgtcgttgtcgtggacaaaactggaacgctgaccaccggccgcccagaactcacagacgtagaagtcatcgagcccgcctacagccagggcgaggtgctggagctcgccgcgcgcgccgagacggcttcagaacatccgcttgccgacgccatcatccgtggtgcccaggatcgggggctgtccacaacattggtggaagcagctgaaaacatcaccggccgaggcattatcgcaaatgttgatggacaggcagttgctgttggatctgctgagttacttgatcatgaaccagactcgaccaggatcctggagctaaatgccgaaggaaagaccgcgatgtttgtcggagtgaacggacacgccattggaatcgtggccgtcgccgacgccgttcgttcagattctgcctcagcaatcgaatcgctgcataaggcgggcattcaagttgtcatggcgactggcgacgctcaccgcgttgcacaaaacgtggcctccaagctgggagtggatgaagtctactcagagctactccctgaacagaaattagaactggtgcgtgatctgcaagctgccggcaaaacggtcgcgatggtgggtgacggagtcaacgacaccccagcattggcagctgctgatatcggagtagcgatgggcgtggcaggttcccctgcagccattgaaaccgctgatatcgcactcatggcggatcgtctcccacggctggcacatgcagtgaccttggcaaaacgcaccgtaagaaccatgcgcatcaatattctgattgcgttggctaccgtgatggtgttactagctggcgtcctatttggcggagttaccatgtcggttggcatgctcgttcacgaagcaagcgtgctgcttgttatcagcatcgccatgctgttgctgcgtccaacacttaaagaagatgctgcgcaagcaagtgatattaaacgctcggaaatacaacagatcgcataaccaatggctgggtactgatg

SEQ ID NO: 398 - protein, 598 aa, Corynebacterium glutamicum
MLADAFMIAAAIVAGWPIAQSAYQALRIRMVSIDLLVVVAAVGAMFINNYWESAAVTFLFALGKALERATMNRTRKALSDLVDAAPETATRLNADDSTEVVELWELEPGDIVLVRNGEQIPVDGNVIAGVGGIDESNITGESMPAEKGQGSDVYAGTWLRSGVLRVEATGIGSDSTLAKIIHRVEDAQDDKARTQTFLEKFSKWYTPGVMIAAAVVGLITWDVELALTLLVIGCPGALVISIPVSIVAGIGRAARDGVLIKGGEYLETAAKVDVVVVDKTGTLTTGRPELTDVEVIEPAYSQGEVLELAARAETASEHPLADAIIRGAQDRGLSTTLVEAAENITGRGIIANVDGQAVAVGSAELLDHEPDSTRILELNAEGKTAMFVGVNGHAIGIVAVADAVRSDSASAIESLHKAGIQVVMATGDAHRVAQNVASKLGVDEVYSELLPEQKLELVRDLQAAGKTVAMVGDGVNDTPALAAADIGVAMGVAGSPAAIETADIALMADRLPRLAHAVTLAKRTVRTMRINILIALATVMVLLAGVLFGGVTMSVGMLVHEASVLLVISIAMLLLRPTLKEDAAQASDIKRSEIQQIA

SEQ ID NO: 399 - DNA, 762 bp, Corynebacterium glutamicum
  CDS (101)..(739): FRXA00980
gttgatggacaggcaggttgctgttggatctgctgagttacttgatcatgaaccagactcgaccaggatcctggagctaaatgccgaaggaaagaccgcgatgtttgtcggagtgaacggacacgccattggaatcgtggccgtcgccgacgccgttcgttcagattctgcctcagcaatcgaatcgctgcataaggcgggcattcaagttgtcatggcgactggcgacgctcaccgcgttgcacaaaacgtggcctccaagctgggagtggatgaagtctactcagagctactccctgaacagaaattagaactggtgcgtgatctgcaagctgccggcaaaacggtcgcgatggtgggtgacggagtcaacgacaccccagcattggcagctgctgatatcggagtagcgatgggcgtggcaggttcccctgcagccattgaaaccgctgatatcgcactcatggcggatcgtctcccacggctggcacatgcagtgaccttggcaaaacgcaccgtaagaaccatgcgcatcaatattctgattgcgttggctaccgtgatggtgttactagctggcgtcctatttggcggagttaccatgtcggttggcatgctcgttcacgaagcaagcgtgctgcttgttatcagcatcgccatgctgttgctgcgtccaacacttaaagaagatgctgcgcaagcaagtgatattaaacgctcggaaatacaacagatcgcataaccaatggctgggtactgatg

SEQ ID NO: 400 - protein, 213 aa, Corynebacterium glutamicum
MFVGVNGHAIGIVAVADAVRSDSASAIESLHKAGIQVVMATGDAHRVAQNVASKLGVDEVYSELLPEQKLELVRDLQAAGKTVAMVGDGVNDTPALAAADIGVAMGVAGSPAAIETADIALMADRLPRLAHAVTLAKRTVRTMRINILIALATVMVLLAGVLFGGVTMSVGMLVHEASVLLVISIAMLLLRPTLKEDAAQASDIKRSEIQQIA

SEQ ID NO: 401 - DNA, 2007 bp, Corynebacterium glutamicum
  CDS (101)..(1984): RXN02348
aaagacccgagccgaagccctggcctgcgcatacttccttgtcaacgctcgctgggattaggtcttttctgagcgctagcatttctccactcaaaggagcatgcttaaccgcatgaaaagtgcgcggccaaaatcagtcgctccaaaatccggacaagctttactcactctcggtgccctaggtgttgtgttcggcgacatcggcaccagccccctgtactcacttcacactgcattcagcatgcagcacaacaaagtcgaagtcactcaggaaaatgtgtacggcatcatctccatggtgttgtggaccatcactttgatcgtcaccgtcaaatacgtcatgctggtcacccgagctgacaaccaaggacaaggtggcatcctggcgctcgttgctttgctgaaaaaccgtgggcactggggaaaattcgtggcagtagccggcatgttgggcgccgcattgttttatggcgatgtggtgatcaccccggcgatctctgttctcagcgcaacagaaggcttgacggttatctccccaagctttgagcgcttcattctgcccgtatctctcgcagttctgatcgctatttttgcaatccaaccgctcggtacagaaaaagtcggcaaagccttcggccccatcatgttgctgtggtttgtcacccttgcaggattgggaattccgcaaatcatcgggcacccagaaatcttgcagagcttgtctccacattgggccctgcgcttgattgtggctgagcctttccaagcatttgtgctgcttggtgccgttgtcctgacagtaacgggtgcggaagcgctctacgctgatatgggccattttggggcgaggccaatcagagtggcgtggttttgcgtcgtcatgcctgctttaatcttgacgtatttggggcagggcgccttggtgatcaaccagcctgaagcggtgcgcaaccccatgttttatctcgcgccggaaggtctgcggattccgttggttattttggcgaccatcgctacggtgatcgcatcgcaggccgtgatttctggtgcgtattcattgaccaagcaggccgtgaatttgaaactgctgccacgcatggtgatccggcatacctcccgcaaagaggaaggccagatctatatgccactggttaatggattgctgtttgtatccgtgatggttgtggtgctggtattccgatcctctgaaagcctcgccagcgcgtacggacttgcagtgaccggaaccttggtgctggtcagcgtcctgtatctgatctatgttcacaccacatggtggaaaacagcgctgttcattgtgctcatcggtattccagaagtacttctattcgcctcgaacaccacgaaaattcacgacggtggctggcttccactacttattgcggccgtgctcatcgtggtgatgcggacctgggagtggggaagtgaccgcgtcaatcaggaacgcgcagagctggaacttcccatggataagttcttggagaaactcgatcagccacacaatattggtctgcgtaaagttgccgaagtggcagtatttccacatggcaccagcgatactgtcccgttgtcattggttcgctgcgtgaaagacctcaagcttttataccgagagatcgtgatcgttcgaatcgtccaagaacacgttccgcacgtgccaccagaggaacgcgcggaaatggaagtgctccatcacgccccgatcagagtcgtgcgagttgatctgcaccttggttattttgatgagcagaacctgcctgagcatctccatgccattgacccaacatgggataacgccacctacttcctgtctgccctgactcttcggagcaggttgcctggaaagattgctggctggcgtgatcgtttgtatctttcgatggaacgtaatcaggcatctcgaactgagtctttcaaattgcaaccaagcaaaaccatcacggttggaacagagctgcacctttaatcaggcagttgctggccaac

SEQ ID NO: 402 - protein, 628 aa, Corynebacterium glutamicum
MLNRMKSARPKSVAPKSGQALLTLGALGVVFGDIGTSPLYSLHTAFSMQHNKVEVTQENVYGIISMVLWTITLIVTVKYVMLVTRADNQGQGGILALVALLKNRGHWGKFVAVAGMLGAALFYGDVVITPAISVLSATEGLTVISPSFERFILPVSLAVLIAIFAIQPLGTEKVGKAFGPIMLLWFVTLAGLGIPQIIGHPEILQSLSPHWALRLIVAEPFQAFVLLGAVVLTVTGAEALYADMGHFGARPIRVAWFCVVMPALILTYLGQGALVINQPEAVRNPMFYLAPEGLRIPLVILATIATVIASQAVISGAYSLTKQAVNLKLLPRMVIRHTSRKEEGQIYMPLVNGLLFVSVMVVVLVFRSSESLASAYGLAVTGTLVLVSVLYLIYVHTTWWKTALFIVLIGIPEVLLFASNTTKIHDGGWLPLLIAAVLIVVMRTWEWGSDRVNQERAELELPMDKFLEKLDQPHNIGLRKVAEVAVFPHGTSDTVPLSLVRCVKDLKLLYREIVIVRIVQEHVPHVPPEERAEMEVLHHAPIRVVRVDLHLGYFDEQNLPEHLHAIDPTWDNATYFLSALTLRSRLPGKIAGWRDRLYLSMERNQASRTESFKLQPSKTITVGTELHL

SEQ ID NO: 403 - DNA, 1157 bp, Corynebacterium glutamicum
  CDS (1)..(1134): FRXA02348
ccaatcagagtggcgtggttttgcgtcgtcatgcctgctttaatcttgacgtatttggggcagggcgccttggtgatcaaccagcctgaagcggtgcgcaaccccatgttttatctcgcgccggaaggtctgcggattccgttggttattttggcgaccatcgctacggtgatcgcatcgcaggccgtgatttctggtgcgtattcattgaccaagcaggccgtgaatttgaaactgctgccacgcatggtgatccggcatacctcccgcaaagaggaaggccagatctatatgccactggttaatggattgctgtttgtatccgtgatggttgtggtgctggtattccgatcctctgaaagcctcgccagcgcgtacggacttgcagtgaccggaaccttggtgctggtcagcgtcctgtatctgatctatgttcacaccacatggtggaaaacagcgctgttcattgtgctcatcggtattccagaagtacttctattcgcctcgaacaccacgaaaattcacgacggtggctggcttccactacttattgcggccgtgctcatcgtggtgatgcggacctgggagtggggaagtgaccgcgtcaatcaggaacgcgcagagctggaacttcccatggataagttcttggagaaactcgatcagccacacaatattggtctgcgtaaagttgccgaagtggcagtatttccacatggcaccagcgatactgtcccgttgtcattggttcgctgcgtgaaagacctcaagcttttataccgagagatcgtgatcgttcgaatcgtccaagaacacgttccgcacgtgccaccagaggaacgcgcggaaatggaagtgctccatcacgccccgatcagagtcgtgcgagttgatctgcaccttggttattttgatgagcagaacctgcctgagcatctccatgccattgacccaacatgggataacgccacctacttcctgtctgccctgactcttcggagcaggttgcctggaaagattgctggctggcgtgatcgtttgtatctttcgatggaacgtaatcaggcatctcgaactgagtctttcaaattgcaaccaagcaaaaccatcacggttggaacagagctgcacctttaatcaggcagttgctggccaac

SEQ ID NO: 404 - protein, 378 aa, Corynebacterium glutamicum
PIRVAWFCVVMPALILTYLGQGALVINQPEAVRNPMFYLAPEGLRIPLVILATIATVIASQAVISGAYSLTKQAVNLKLLPRMVIRHTSRKEEGQIYMPLVNGLLFVSVMVVVLVFRSSESLASAYGLAVTGTLVLVSVLYLIYVHTTWWKTALFIVLIGIPEVLLFASNTTKIHDGGWLPLLIAAVLIVVMRTWEWGSDRVNQERAELELPMDKFLEKLDQPHNIGLRKVAEVAVFPHGTSDTVPLSLVRCVKDLKLLYREIVIVRIVQEHVPHVPPEERAEMEVLHHAPIRVVRVDLHLGYFDEQNLPEHLHAIDPTWDNATYFLSALTLRSRLPGKIAGWRDRLYLSMERNQASRTESFKLQPSKTITVGTELHL

SEQ ID NO: 405 - DNA, 778 bp, Corynebacterium glutamicum
  CDS (101)..(778): FRXA02344
aaagacccgagccgaagccctggcctgcgcatacttccttgtcaacgctcgctgggattaggtcttttctgagcgctagcatttctccactcaaaggagcatgcttaaccgcatgaaaagtgcgcggccaaaatcagtcgctccaaaatccggacaagctttactcactctcggtgccctaggtgttgtgttcggcgacatcggcaccagccccctgtactcacttcacactgcattcagcatgcagcacaacaaagtcgaagtcactcaggaaaatgtgtacggcatcatctccatggtgttgtggaccatcactttgatcgtcaccgtcaaatacgtcatgctggtcacccgagctgacaaccaaggacaaggtggcatcctggcgctcgttgctttgctgaaaaaccgtgggcactggggaaaattcgtggcagtagccggcatgttgggcgccgcattgttttatggcgatgtggtgatcaccccggcgatctctgttctcagcgcaacagaaggcttgacggttatctccccaagctttgagcgcttcattctgcccgtatctctcgcagttctgatcgctatttttgcaatccaaccgctcggtacagaaaaagtcggcaaagccttcggccccatcatgttgctgtggtttgtcacccttgcaggattgggaattccgcaaatcatcgggcacccagaaatcttgcagagcttgtctccacattgggccctgcgcttgattgtggctgagcctttccaagcatttgtgctg

SEQ ID NO: 406 - protein, 226 aa, Corynebacterium glutamicum
MLNRMKSARPKSVAPKSGQALLTLGALGVVFGDIGTSPLYSLHTAFSMQHNKVEVTQENVYGIISMVLWTITLIVTVKYVMLVTRADNQGQGGILALVALLKNRGHWGKFVAVAGMLGAALFYGDVVITPAISVLSATEGLTVISPSFERFILPVSLAVLIAIFAIQPLGTEKVGKAFGPIMLLWFVTLAGLGIPQIIGHPEILQSLSPHWALRLIVAEPFQAFVL

SEQ ID NO: 407 - DNA, 1058 bp, Corynebacterium glutamicum
  CDS (1)..(1035): RXN00960
atggctcggcattgttgcagcaatcgctacgcgtccaccgtcttctccggtctgatcgcctacggagcatcccaagcgctctacccatggctgctgaaagaccaccaaagcgtcaccgaaatcgaccttgatgcaggtgccctccagccctacttcaacatcgagatgccaccaccatttgaagtgatgaccgcactgctgctggcattctgcctcggcctgggcatggctgtaattaaatcagacaccctgttcaaggtaacccgcgaactcgagcgcgtagtcatgaagaccatcaccgcctttgtcatcccactgctgccactcttcatcttcggcatcttcctcggcatgggcatgaacggtggcctcctggagatcatgtccgcctttggcaaggtactgattctcgccgtcgtgggaaccctgctcttcctagccatccagttcattatcgctggtgcagtatccaagaagaacccatggaaactgttcaaaaacatgctccctgcatacttcactgcactgggcacttcctcttcagcggcaaccatcccagtgacctaccagcagaccctgaaaaacgatgttgatgtcaacgtcgcaggctttgttgtcccactgtgcgccaccatccacctagctggatcgatgatgaagatcggcctcttcaccttcgctgttgtcttcatgtacgacatggaagtaggcgtcggcctctccatcggattcctcctcatgctgggcatcaccatgatcgccgcaccaggcgttcccggcggagccatcatggcagcaaccggcatgctggcctccatgctcggattcaacaccgaacaagtcgccctcatgatcgccgcttacatcgcgattgactccttcggcaccgcagcaaacgtcaccggcgacggcgcaatcgcagtcatcgtgaacaaattcgccaagggccagctgcacaccacttccccagatgaaatcgaagaagacgaccgcgttgccttcgacatcactccatcggatgtggaacatcacaagtagaaacccgcattttctgtagt

SEQ ID NO: 408 - protein, 345 aa, Corynebacterium glutamicum
MARHCCSNRYASTVFSGLIAYGASQALYPWLLKDHQSVTEIDLDAGALQPYFNIEMPPPFEVMTALLLAFCLGLGMAVIKSDTLFKVTRELERVVMKTITAFVIPLLPLFIFGIFLGMGMNGGLLEIMSAFGKVLILAVVGTLLFLAIQFIIAGAVSKKNPWKLFKNMLPAYFTALGTSSSAATIPVTYQQTLKNDVDVNVAGFVVPLCATIHLAGSMMKIGLFTFAVVFMYDMEVGVGLSIGFLLMLGITMIAAPGVPGGAIMAATGMLASMLGFNTEQVALMIAAYIAIDSFGTAANVTGDGAIAVIVNKFAKGQLHTTSPDEIEEDDRVAFDITPSDVEHHK

SEQ ID NO: 409 - DNA, 482 bp, Corynebacterium glutamicum
  CDS (1)..(459): FRXA00960
ctgaaaaacgatgttgatgtcaacgtcgcaggctttgttgtcccactgtgcgccaccatccacctagctggatcgatgatgaagatcggcctcttcaccttcgctgttgtcttcatgtacgacatggaagtaggcgtcggcctctccatcggattcctcctcatgctgggcatcaccatgatcgccgcaccaggcgttcccggcggagccatcatggcagcaaccggcatgctggcctccatgctcggattcaacaccgaacaagtcgccctcatgatcgccgcttacatcgcgattgactccttcggcaccgcagcaaacgtcaccggcgacggcgcaatcgcagtcatcgtgaacaaattcgccaagggccagctgcacaccacttccccagatgaaatcgaagaagacgaccgcgttgccttcgacatcactccatcggatgtggaacatcacaagtagaaacccgcattttctgtagt

SEQ ID NO: 410 - protein, 153 aa, Corynebacterium glutamicum
LKNDVDVNVAGFVVPLCATIHLAGSMMKIGLFTFAVVFMYDMEVGVGLSIGFLLMLGITMIAAPGVPGGAIMAATGMLASMLGFNTEQVALMIAAYIAIDSFGTAANVTGDGAIAVIVNKFAKGQLHTTSPDEIEEDDRVAFDITPSDVEHHK

SEQ ID NO: 411 - DNA, 1509 bp, Corynebacterium glutamicum
  CDS (101)..(1486): RXA01070
cagcttcggttaatttggtcacactaatgcaataaattcctgtctacagcgttacagttaatgaattcaattcaaccgctaaacgcaaggagtgctacccatggctaacgccaccgcacagaagggccgtttcggccttcccggctggatgactggctttggtgcccaggttatcgccggcctcattcttggtcttattctcggccttgtcgcccgaggcatggacagcggcgctgcagacggtgaagcaagctggcttaccggtcttcttagcggcgtcggttctgcttatgtttctctacttaaagttatggttccaccactggtgttcgctgcagtggttaccagtgtggcaaagttgcgcgaggtagctaacgctgctcgcctggctgtttccaccttggtgtggttcgccattactgcattcttctctgtgctcgcgggtatcgccgtagcgctgattatgcagcctggtgttggatccactgtcgacgcatctaatgctgctgatccttctcgcgtgggcagctggctgggctttatccagtccgttattccatcaaacattctgggactttccggttcttacagtgagaactctggtgtgaacctgtccttcaacgtgctgcagatcctggttatctccattgcgattggtgttgcagctctgaaggctggcaagtccgccgagcctttcttgaagttcaccgagtccttcctcaagatcatccagatcgtgttgtggtggattattcgcctggctccaattggttccgctgcgctgatcggtaatgctgttgctacctacggttggtctgcacttggatccctgggcaagtttgttcttgcgatctacgttggtctggcaatcgtcatgttcgttatctacccagtcgtgctgaagctcaatggaattcctgttcttggattcttcaagcgcgtttggcctgtcacaagccttggctttgttacccgttcctccatgggcgttatgccagttacccagcgcgttactgagcagtccttgggtgttccatctgcgtacgcttcctttgctatcccactgggtgcgaccagcaagatggacggctgcgctgctgtctacccagctgttgccgctatcttcgtggcacagttctacggcattgacttgagcatcatggattacgtactgatcatgatcgtctctgtcctgggctctgctgcaactgcaggcaccactggcgcaaccgtcatgctgaccctgaccctatccaccttgggtctgccacttgctggtgttggtctgctgctggctatcgagccaatcatcgacatgggacgtaccgcaaccaacgtcaccggtcaggcactggttcctgcgatcgttgctaagcgcgagggcattctggatcaggatgtgtgggatgctgctgaaaagggtggcgctgctattgaaatggcaaccgtctctgagaaagaaactgagcctgcagaggttcgctcctaagctctcttgagtacctgaga

SEQ ID NO: 412 - protein, 462 aa, Corynebacterium glutamicum
MANATAQKGRFGLPGWMTGFGAQVIAGLILGLILGLVARGMDSGAADGEASWLTGLLSGVGSAYVSLLKVMVPPLVFAAVVTSVAKLREVANAARLAVSTLVWFAITAFFSVLAGIAVALIMQPGVGSTVDASNAADPSRVGSWLGFIQSVIPSNILGLSGSYSENSGVNLSFNVLQILVISIAIGVAALKAGKSAEPFLKFTESFLKIIQIVLWWIIRLAPIGSAALIGNAVATYGWSALGSLGKFVLAIYVGLAIVMFVIYPVVLKLNGIPVLGFFKRVWPVTSLGFVTRSSMGVMPVTQRVTEQSLGVPSAYASFAIPLGATSKMDGCAAVYPAVAAIFVAQFYGIDLSIMDYVLIMIVSVLGSAATAGTTGATVMLTLTLSTLGLPLAGVGLLLAIEPIIDMGRTATNVTGQALVPAIVAKREGILDQDVWDAAEKGGAAIEMATVSEKETEPAEVRS

SEQ ID NO: 413 - DNA, 428 bp, Corynebacterium glutamicum
  CDS (1)..(405): RXA02628
atgcttgaaggttttagagatttcgtccttcggggaaatgtcattgaactcgcagttgccgtggtcatcggtactgccttcaccgctatcgtgacagcattctccgagagcatcatcaacccattgatcgcttccatcggcagcacagaggttgaaggcctcggcttccacatccgcgccggcaatgccgcaacattcgtggattttggtgctgtcatcaccgcagcgatcaacttcctcatcatcgcagcaattgtctacttcgttctcgttgctccaatgaacaagctcagcgaaaccctcgcaaagcgcaagggtgttgaagaagacgagaccccagcttccatcgaagcagaactcctcaccgagatccgcgatctcctgcaggagcaaaagcgccttcagtagttaaaaggccctaaaagcac

SEQ ID NO: 414 - protein, 135 aa, Corynebacterium glutamicum
MLEGFRDFVLRGNVIELAVAVVIGTAFTAIVTAFSESIINPLIASIGSTEVEGLGFHIRAGNAATFVDFGAVITAAINFLIIAAIVYFVLVAPMNKLSETLAKRKGVEEDETPASIEAELLTEIRDLLQEQKRLQ

SEQ ID NO: 415 - DNA, 993 bp, Corynebacterium glutamicum
  CDS (101)..(970): RXN03164
cttttttgcatccagatgcacaaagccgtggcacaaacgagacaaactgagcacaatggctgtcatggcatatcaaccagcagacaatcgctatgacgacatgatctaccgcagggtgggaaattctgggctgaagcttccggcaatttcgcttgggctgtggcacaacttcggtgatgacaagccgctttcaacgcagcgcagcattattcaccgcgcgtttgataggggagtcactcacttcgatttggctaataactatggacctccagcaggttccgcagagaccaactttggcaggattttgcgtgaggatctcaaaagccaccgcgatgagttgatcatttcttccaaggcgggttgggatatgtggcctggaccttatggttttggtggttcccgaaagtatctagtgagttcccttgatcagtccctgactcgcctcggcttggattacgtggatattttctatcatcaccgcccggatccagatactcctttggaagaaaccatgtacgcattgcgtgacattgttgcgtctggaaaggctctttacgtgggtatttcttcctacggtccagagctcacagcggaggcggctgagttcatggcggaggagggctgcccgcttctgattcatcagccaagctattccatcattaatcgttgggtggaggaaccgggcgatgacggtgagaacttgttgcagtcagctgccaacaatggtcttggcgtcattgctttctcaccacttgcgcagggcctgctcacggacaaatatctcgatggaattccagagggttcccgcgccagccagggtaagtccctgtctgagggcatgttgaacgtgaacaatattgatatggtccgcaagctcaatgacatcgcccaggaacgcgggcagtcacttgcgcagatggcgcttgcatgggtgctgcgcgagcaaagagagtacggcgccggattaccgtgaccagtgcattgattggtgct

SEQ ID NO: 416 - protein, 290 aa, Corynebacterium glutamicum
MIYRRVGNSGLKLPAISLGLWHNFGDDKPLSTQRSIIHRAFDRGVTHFDLANNYGPPAGSAETNFGRILREDLKSHRDELIISSKAGWDMWPGPYGFGGSRKYLVSSLDQSLTRLGLDYVDIFYHHRPDPDTPLEETMYALRDIVASGKALYVGISSYGPELTAEAAEFMAEEGCPLLIHQPSYSIINRWVEEPGDDGENLLQSAANNGLGVIAFSPLAQGLLTDKYLDGIPEGSRASQGKSLSEGMLNVNNIDMVRKLNDIAQERGQSLAQMALAWVLREQREYGAGLP

SEQ ID NO: 417 - DNA, 1209 bp, Corynebacterium glutamicum
  CDS (101)..(1186): FRXA01395
  misc_feature 922, 956, 957, 960, 966: n = a, c, t, or g
  VARIANT 258: Xaa = Leu
  VARIANT 259: Xaa = Cys or Ser
  VARIANT 260: Xaa = Asp or Tyr
  VARIANT 261: Xaa = Gly
  VARIANT 262, 270: Xaa = Met or Leu
  VARIANT 272: Xaa = Pro
  VARIANT 273: Xaa = Arg, Lys, Ser, or Asn
  VARIANT 274: Xaa = Phe or Leu
  VARIANT 275: Xaa = Lys, Asn, Met, or Ile
  VARIANT 276: Xaa = Gly, Arg, Ala, or Thr
  VARIANT 277: Xaa = Ile or Phe
  VARIANT 279: Xaa = Lys or Gln
  VARIANT 280: Xaa = Glu, Lys, Asp, or Asn
  VARIANT 286: Xaa = any amino acid except Glu, Lys, Met,
  Gln, or Trp
  VARIANT 287: Xaa = Leu, Pro, Gln, or Arg
  VARIANT 289: Xaa = Val, Ala, Asp, or Gly
ctcaaaagcactgataaaagcagtcaacccacctcgggttggctgcttttttgcatccagatgcacaaagccgtggcacaaacgagacaaactgagcacaatggctgtcatggcatatcaaccagcagacaatcgctatgacgacatgatctaccgcagggtgggaaattctgggctgaagcttccggcaatttcgcttgggctgtggcacaacttcggtgatgacaagccgctttcaacgcagcgcagcattattcaccgcgcgtttgataggggagtcactcacttcgatttggctaataactatggacctccagcaggttccgcagagaccaactttggcaggattttgcgtgaggatctcaaaagccaccgcgatgagttgatcatttcttccaaggcgggttgggatatgtggcctggaccttatggttttggtggttcccgaaagtatctagtgagttcccttgatcagtccctgactcgcctcggcttggattacgtggatattttctatcatcaccgcccggatccagatactcctttggaagaaaccatgtacgcattgcgtgacattgttgcgtctggaaaggctctttacgtgggtatttcttcctacggtccagagctcacagcggaggcggctgagttcatggcggaggagggctgcccgcttctgattcatcagccaagctattccatcattaatcgttgggtggaggaaccgggcgatgacggtgagaacttgttgcagtcagctgccaacaatggtcttggcgtcattgctttctcaccacttgcgcagggcctgctcacggacaaatatctcgatggaattccagagggttcccgcgccagccagggtaagtccctktstkacggswtgttgaacgtgaacaatattgatwtggtcccmarsytnawkrsawtttccmarramaccgggcagtcctttnnccnaaaggncttttgttgggttgttgcccaaccaaggaaagtacggcgccggattaccgtgaccagtgcattgattggtgcttcgtcagttgagcagctggacaacagccttgattcactcaacaacttggagttttctgacgccgagttggaggcgatcgatgagatttcccacgacgccggcatcaacatttgggcgaaggccaccgattccaaaacccgcgaaaactaacccatcaacatcagtttgat

SEQ ID NO: 418 - protein, 362 aa, Corynebacterium glutamicum
  VARIANT 258: Xaa = Leu
  VARIANT 259: Xaa = Cys or Ser
  VARIANT 260: Xaa = Asp or Tyr
  VARIANT 261: Xaa = Gly
  VARIANT 262, 270: Xaa = Met or Leu
  VARIANT 272: Xaa = Pro
  VARIANT 273: Xaa = Arg, Lys, Ser, or Asn
  VARIANT 274: Xaa = Phe or Leu
  VARIANT 275: Xaa = Lys, Asn, Met, or Ile
  VARIANT 276: Xaa = Gly, Arg, Ala, or Thr
  VARIANT 277: Xaa = Ile or Phe
  VARIANT 279: Xaa = Lys or Gln
  VARIANT 280: Xaa = Glu, Lys, Asp, or Asn
  VARIANT 286: Xaa = any amino acid except Glu, Lys, Met,
  Gln, or Trp
  VARIANT 287: Xaa = Leu, Pro, Gln, or Arg
  VARIANT 289: Xaa = Val, Ala, Asp, or Gly
MAVMAYQPADNRYDDMIYRRVGNSGLKLPAISLGLWHNFGDDKPLSTQRSIIHRAFDRGVTHFDLANNYGPPAGSAETNFGRILREDLKSHRDELIISSKAGWDMWPGPYGFGGSRKYLVSSLDQSLTRLGLDYVDIFYHHRPDPDTPLEETMYALRDIVASGKALYVGISSYGPELTAEAAEFMAEEGCPLLIHQPSYSIINRWVEEPGDDGENLLQSAANNGLGVIAFSPLAQGLLTDKYLDGIPEGSRASQGKSXXXXXLNVNNIDXVXXXXXXSXXTGQSFXXKXFCWVVAQPRKVRRRITVTSALIGASSVEQLDNSLDSLNNLEFSDAELEAIDEISHDAGINIWAKATDSKTREN

SEQ ID NO: 419 - DNA, 1911 bp, Corynebacterium glutamicum
  CDS (101)..(1888): RXA02597
atacccactttgcaagaattacaaacgggggcaccctcaatgacttgaaacactttatagagtagaaagtgagtcacgacactttttaaaggaggatgctttgcccgaacaagacttaaccaccttggccaatgattggctccaagcttttgaaaaggccactgctagttccagccctgatgaagctgccactgcagtcgtgcaactttttgaggatgaaggatactggcgagaccttcttgcattcacgtggaacctcaccaccgctgaaggtgcagatgaaatcgccgagatgattcgcaatacgtggccatcaagcatcttccgaaacgttgagctaaagggcgaaccagctgatgaaggagatggtgtcactcgcgtacatttctcctgcgaatccgcagacttcaagtgcacgggcattgtccgccttcgtaatggcaaggcgtggacgctactcacctcagctcgtgagctcctggagcacccagagcccaaggggcgcaaccgtgagatgggcgtcgtccatggacaaaatgaggacacccgaaattggactgaccgcaagaatgatcgacaagcagcgttgggtgtcaccgagcagccatacaccctcatcatcggtggtggacagggtggcattgccttgggcgcacgactcaagcgacttggtgtacccgctctaatcattgataaagcatctcgcccgggcgaccagtggcgtagccgttaccattctctctgcctgcacgatccagtttggtacgaccacctgccttacattccattcccagatcattggccagtatttactccaaaggacaagatgggtgactggctcgagcactatgtcggcatcatggatttggactattggaccaacaccgagtgcctgcgcgcctcatacaatgaggacaccaagcagtgggatgtgacggtcaatcgtgatggcgcggagtccacgctccaccccacccaactagtcatggctactggaatgtcgggcagcccgaacaaaccaactttgcctggccaggataagttccagggtgaaattcggcactcttcagagcaccccggcggcgatgtcgatcgcgataagaacgttgtagttctgggcgctaacaactcagcccacgacatctgcgcggatctttattccaatggtgcaaagcccgtgatgattcagcgctcgtctacacacatcgtgcgttctgattcgctgatgcgcgaagtcttcgggcctctctattctgaggatgccgttgaagccggaattgataccgatactgccgatctcctgtttgcgtcgtggccatataaggtgctgccaggtgtgcagaagcaggctttcgacaagatccgtgaggacgacaaggagttctacgacaagcttgaaaatgctggattcttgcttgatttcggcgatgacgattcggggcttttcttaaagtaccttcgccgtggctctggctactacatcgatgtcggcgcctctgaactggtggctgatggaaagattccggtgcgctccaatgtcagcattgaagacgtcaaggaaaactctgtggtgctcacagatggtactgagctcccagctgacgtgattgttctagcgaccggctatggaaacatgaacaactgggttgctcagctggttgatcaggaaaccgctgacaaggtcggcccatgctggggtctgggctctgaaaccaccaaggatccaggcccatgggaaggcgagttgcgcaatatgtggaagcccacaaacgtggattcgctgtggttccatggtggcaaccttcaccagtcacgccattactcacggtatttgtccatgcagttgaaggcgcgctacgaaggtatgaacactccggtgtacagcaagtagatacaaagaaaagggcatct

SEQ ID NO: 420 - protein, 596 aa, Corynebacterium glutamicum
LPEQDLTTLANDWLQAFEKATASSSPDEAATAVVQLFEDEGYWRDLLAFTWNLTTAEGADEIAEMIRNTWPSSIFRNVELKGEPADEGDGVTRVHFSCESADFKCTGIVRLRNGKAWTLLTSARELLEHPEPKGRNREMGVVHGQNEDTRNWTDRKNDRQAALGVTEQPYTLIIGGGQGGIALGARLKRLGVPALIIDKASRPGDQWRSRYHSLCLHDPVWYDHLPYIPFPDHWPVFTPKDKMGDWLEHYVGIMDLDYWTNTECLRASYNEDTKQWDVTVNRDGAESTLHPTQLVMATGMSGSPNKPTLPGQDKFQGEIRHSSEHPGGDVDRDKNVVVLGANNSAHDICADLYSNGAKPVMIQRSSTHIVRSDSLMREVFGPLYSEDAVEAGIDTDTADLLFASWPYKVLPGVQKQAFDKIREDDKEFYDKLENAGFLLDFGDDDSGLFLKYLRRGSGYYIDVGASELVADGKIPVRSNVSIEDVKENSVVLTDGTELPADVIVLATGYGNMNNWVAQLVDQETADKVGPCWGLGSETTKDPGPWEGELRNMWKPTNVDSLWFHGGNLHQSRHYSRYLSMQLKARYEGMNTPVYSK

SEQ ID NO: 421 - DNA, 367 bp, Corynebacterium glutamicum
  CDS (101)..(367): RXA01454
ggccaggactttggcgtttcggatcagcagttcggcttggattatggattctacgcgtttgatcttccgatgcttcgcctcatcgcttgactcactgtcgatgatgttgatcgttgctttcctgatcgcactcgttggccattacctcatgggtggcattcgcgctggaaaccagatgacgggccagaagtcctttgtatcccgtggtgcgcgcactcagcttgcggtaactgctggtctgtggatgcttgttaaggtcgctggctactggctggatcgctatgacctgctgactaaggaaaactcaaccttcacaggtgcaagctacaccgacatcaatgcacagctgccagcgaagatcatcctg

SEQ ID NO: 422 - protein, 89 aa, Corynebacterium glutamicum
MMLIVAFLIALVGHYLMGGIRAGNQMTGQKSFVSRGARTQLAVTAGLWMLVKVAGYWLDRYDLLTKENSTFTGASYTDINAQLPAKIIL

SEQ ID NO: 423 - DNA, 585 bp, Corynebacterium glutamicum
  CDS (101)..(562): RXA01455
agagtgggggagaaacgcataatcacgtacatataaggatattgtcttgtcgactggtctcacacctcctccccaaccgatcaagcgacctcccaaggcggtgacatggatcttcgccattatcgcgttggtcattctcatcgccccaatgagtgttggcttctataccgactggctttggttcggtgaagtcgatttccgaggcgttttcagcaaggttattgtcactcgcattgttctctttgtgatctttgcgctaattgctgggtttgtcacatggcttgctggttattttgtgacaaaacttcgacctgatgagatgtcggcgtttgatacccagtcgcctgtgtatcagtaccgtcagatgatcgaaaacagccttcgtcgcgttatggtgatcattccaattttcgtcgcgttgctggctggcctaattggtcagcgttcgtggcgcaccgttcaaatgtggctgaatggccaggactttggcgtttcggatcagcagttcggcttggattatggattctacgcgtttgatcttccgatgcttcgcctcatcgcttgactcactgtcgatgatgttga

SEQ ID NO: 424 - protein, 154 aa, Corynebacterium glutamicum
VTWIFAIIALVILIAPMSVGFYTDWLWFGEVDFRGVFSKVIVTRIVLFVIFALIAGFVTWLAGYFVTKLRPDEMSAFDTQSPVYQYRQMIENSLRRVMVIIPIFVALLAGLIGQRSWRTVQMWLNGQDFGVSDQQFGLDYGFYAFDLPMLRLIA

SEQ ID NO: 425 - DNA, 987 bp, Corynebacterium glutamicum
  CDS (101)..(964): RXA02684
gcaggttcgtccacagccgccggtgattgcaggggatggggggaggcgtcgaaaagcaatatcttttaagccccgtggctgcctgggcacgatcgcgggcgtgcttgctgtgggcttggtgcttgtgtttgtggtgacgctgtgggcggattcgaagctgaatcgcgtggatgccacgcctgcgacgcaggtggcgaacactgccggaacgaactggctgctggtaggttcggattcgcggcagggtttaagtgatgaggatattgagcggctaggtaccggcggcgatatcggtgtgggccgtacggacacgatcatggtgttgcatatgccgcgtactggcgagccgacgctgttgtcgattccgcgtgattcttatgtcaatgtccctggctggggcatggataaggcaaacgccgcatttaccgtgggtggcccggaactgctgacgcaaaccgtggaggaggcaactggcctgcgaattgatcactatgcagaaatcggcatgggtggtttggcgaacatggttgatgccgtgggcggcgtggaaatgtgtcctgctgagccgatgtatgatccgctcgcgaacctggatattcaggctggttgccaggaatttgatggggcagccgcgctgggttatgtgcgcactcgtgccacagccctgggtgatctggaccgggtggtgcgtcagcgggaattcttctccgctctgctgagtacagctacgtccccgggcacgttgctgaatccgttccgcaccttcccgatgatctccaacgcggtgggaacattcaccgtcggcgagggcgatcacgtgtggcacctggcccgattggcgctggcgatgcgcggaggaatcgtgacggagaccgtgccgattgcctcattcgcagattacgatgtgggaaatgttgcgatttgggacgaagctggagccgaagcactatttagctccatgcgctaaaaccccaggtaatcgttcac

SEQ ID NO: 426 - protein, 288 aa, Corynebacterium glutamicum
VLAVGLVLVFVVTLWADSKLNRVDATPATQVANTAGTNWLLVGSDSRQGLSDEDIERLGTGGDIGVGRTDTIMVLHMPRTGEPTLLSIPRDSYVNVPGWGMDKANAAFTVGGPELLTQTVEEATGLRIDHYAEIGMGGLANMVDAVGGVEMCPAEPMYDPLANLDIQAGCQEFDGAAALGYVRTRATALGDLDRVVRQREFFSALLSTATSPGTLLNPFRTFPMISNAVGTFTVGEGDHVWHLARLALAMRGGIVTETVPIASFADYDVGNVAIWDEAGAEALFSSMR

SEQ ID NO: 427 - DNA, 522 bp, Corynebacterium glutamicum
  CDS (101)..(499): RXN02391
caaagtggcgatcctgaatttgccatcgaatctgccgtgagaagagttgcagagctggcgaggcggtaacgctgaacggcggcgggtaagatatttgagcatgacacaatcagatttacccgatgatgttcaggaattggtcactaagatctttggactggcacgtgatgggggagcagaatccgcagcaaccctcggtgcatatgtcgacaacggcgttgacgttaacctgtccaaccaagatggcaacactttgctcatgctcgcagcatatgcaggacatgctgatgtcgtgcaggcgttgattgagcgtggcgccgatgtggatcgcgtgaacaaccgcaatcagacgccgctggcgggcgcgatctttaagaaggaagaagccgtcattgaggcactgcttgctggtggtgctgacccatacgctggaactccaactgctgttgataccgccaagatgtttggccgcgaggatctcgtagctcgcttcgagtcataggccggtggagtggaccgctt

SEQ ID NO: 428 - protein, 133 aa, Corynebacterium glutamicum
MTQSDLPDDVQELVTKIFGLARDGGAESAATLGAYVDNGVDVNLSNQDGNTLLMLAAYAGHADVVQALIERGADVDRVNNRNQTPLAGAIFKKEEAVIEALLAGGADPYAGTPTAVDTAKMFGREDLVARFES

SEQ ID NO: 429 - DNA, 2826 bp, Corynebacterium glutamicum
  CDS (101)..(2803): RXN02549
gcagtcgcagtagttggggtttcaatgatctcagggcaggacactgttcccactggtaacgccgtaactgcagacgatgccctgctcggtggccctgagtatggttcacgcgaagcagactaagaagccacttccccgttttcttcactcggcgcatttctatgtctggattgtgctgggttttgtggtgtttgcgcaaccttatggtcaggttgctgccgatactaaactagatttgctgctcaaccccgcaggatttttaaccggtgcgcttcatgcgtggactgacacgttcaccttgggtcagttgcaaaaccaagcttatggctatctgtttccccaagggtttttcttcctcataactgatttcctccctgactggattgcgcagcgactgtggtggtggcttgttcttggcctgggattttctggattctacgcactggtagcccggctggggattggcaatcctgcattcagggtgatcgccgcgctgctgtttgctctgtccccgcgcacgctcaccaccctcactgcaatctcctccgaaacttggcctatcatgctcgcgccatgggtatgtctgcctctgctttcgcgaaatgtggatgcacgggccatcgcgttgtccttacttcccgcggcatgcatgggtgcagttaatgccaccgccacgatggcagcactcatcccggcagcgctgatcttgctgtatagagggctcttcttaaggctgcttctgtggggaatgggcgttctcgctgttaattcatggtggatcggacctttgttggtgcttggcaaatacgccccgcccttcaccgaattcatcgaaagttcctccgtcaccacttcctggctcaacccagtagaaatactccgcggaaccaccagttggacacccttcgtagacactgaacgacaagccggatatctcctggtcaacgatgctctctttgtcaccctcagcgttctcgtcgcagccctcggcttgatcggcctcaccttgatgaaacaccgtggactgtgggcattcatgctggccatcggactcctcatcctcggcagcgcccacctaacggctgttcaagaattcctcgacggcccaggcgcagcacttcgaaacatccacaaatttgatctattagtccgcatgccgttgatggtgggcgttgccgcattggggtcgcatatcagtctgcccttgcttgggacgactgcattgaccagcggacaaggcaaacaccacaccatcccgctgcctctccaaaaacgccaagccgcaggactcctcgtggtgatcatcgctgtcggtgctcttgctcccgcatggtcggcacggctgctacctcagggaacgtgggatgaagtgcctgactactggtacgaagccacagaattcctcaaccaaaacgccacaggcacccgcacgttgatttggcctagctcgccgtttgcccgccaggactggggatggactcgggatgaaccagctcaaccacttcttgatgttccgtgggctgtccgcgatgccattcctttggttcccccggaggcgattcgcggattagatggtctcgacgacctaggcactctaggcaccggtctaaacgacgaggctttaaaacgtctaggcatcggcgcagtactggtgaggcatgatctggaagccgacccagatattgaggtggatctgcctggggaaaagcacacttttggctcccaaggccaagtagacgtctacctcaccgaccccgaccgcaatatgtggatcacttccggcacatccaagcagctgcccaccgtcgctggcggcggcgaaatcctctcgctcctagacaccatcaacggctattccccgaggactttggtgagtgagaatgcccagatcgtcaccgatacccctcagctagtcggcacaaattacggcgatggcaccagttccgcagcattggccagccttgatgagactgaggtgaaaaaccgcatcgtggattatccttccgcggggccaatgacgcaggtggtgcaggaaggttccatcacggcgtcttcgtctggttccgatgccacttctttcggcggcgcggatcctgatcgttcccttaattcacttcttgatcatcgttacaacaccgcctggtacccgacacctggcgatacgtctccgtggctcgaagtctccggtaccggcaccacattatcgatctccccccgcagcaccgtcaccgccaccatcacctccggcgattccgtgatggtccgcgagttcgaaaaaggccgcaccaccacagttacgttggcggagcctgaagctcgcattgaattcgatggtttcgtaggaatttccgagctgtccctagagggtctcagccgcaccatcactgtgccggagacctctcctgacgtgcagcaattcgttttccaacgcctcacagtgcccacctcgttcctcgaccgcactttcacagtcccccgccacatgtccgtcaccgtggaggcccaatcctgcgtcacattggaactcgacggcgatcgcatcgactgtggcccctcgaactcacccccggaacccacacgctgcgcacccaatcggaatgggtcaccctcaccgaatccgctccgctcgccgctgttcagccagcaacaaacatcgaggcagcacccaccgaccgcgtgctcgtcaccacgcgcgctttcaattcaggtaccagcgcgcttatcgacgccacccccctttccccaatccaactcgacgcctcctcccaaggtttcatcatccccgcgaacgcctccggcgagttgagcttcgctttcgacggcgaa

SEQ ID NO: 430 - protein, 901 aa, Corynebacterium glutamicum
MVHAKQTKKPLPRFLHSAHFYVWIVLGFVVFAQPYGQVAADTKLDLLLNPAGFLTGALHAWTDTFTLGQLQNQAYGYLFPQGFFFLITDFLPDWIAQRLWWWLVLGLGFSGFYALVARLGIGNPAFRVIAALLFALSPRTLTTLTAISSETWPIMLAPWVCLPLLSRNVDARAIALSLLPAACMGAVNATATMAALIPAALILLYRGLFLRLLLWGMGVLAVNSWWIGPLLVLGKYAPPFTEFIESSSVTTSWLNPVEILRGTTSWTPFVDTERQAGYLLVNDALFVTLSVLVAALGLIGLTLMKHRGLWAFMLAIGLLILGSAHLTAVQEFLDGPGAALRNIHKFDLLVRMPLMVGVAALGSHISLPLLGTTALTSGQGKHHTIPLPLQKRQAAGLLVVIIAVGALAPAWSARLLPQGTWDEVPDYWYEATEFLNQNATGTRTLIWPSSPFARQDWGWTRDEPAQPLLDVPWAVRDAIPLVPPEAIRGLDGLDDLGTLGTGLNDEALKRLGIGAVLVRHDLEADPDIEVDLPGEKHTFGSQGQVDVYLTDPDRNMWITSGTSKQLPTVAGGGEILSLLDTINGYSPRTLVSENAQIVTDTPQLVGTNYGDGTSSAALASLDETEVKNRIVDYPSAGPMTQVVQEGSITASSSGSDATSFGGADPDRSLNSLLDHRYNTAWYPTPGDTSPWLEVSGTGTTLSISPRSTVTATITSGDSVMVREFEKGRTTTVTLAEPEARIEFDGFVGISELSLEGLSRTITVPETSPDVQQFVFQRLTVPTSFLDRTFTVPRHMSVTVEAQSCVTLELDGDRIDCGPSNSPPEPTRCAPNRNGSPSPNPLRSPLFSQQQTSRQHPPTACSSPRALSIQVPARLSTPPPFPQSNSTPPPKVSSSPRTPPAS

SEQ ID NO: 431 - DNA, 1581 bp, Corynebacterium glutamicum
  CDS (101)..(1558): RXN00808
cgcgatgtcgcaccggcacgttagagtattgagcatgagtcgattgcttagagcattgaaatggctgtggggcacatcgtggccgctgtatgctgcgacggtgctcggcacgaatgtgtttggtgcgctcgcagtaatgctgtttgtgcgcttcctcattccgcagccagatgcttcaaatttcaacgctgagatctcgtatctgccagctgttggtttcgcatacctggcgttcgccattgtcgcgggcatgctggtgacatttttgatgttccgcccggtgcttgattggcagcgaagccctgaagatcatgaccgaaatatggtgcgcaacttggttatgcgcatccccatctaccaggcaattctgtgcgcagtggtgtggttaatcggcattgcaattgcaacgttgatttcggccagtgtgtctaccagtttggcgctggtcgtggcgttttccacgttgatggctgccgcaatcgtcgtgctgctcacctaccttgaggctgagcgtttggtgcgtccggttgctgcgtctgccctggcgcgtcgatttgaggattccacgctggaaccacctgtgagccagcgcttgcgtatgacgtggttgctgacgttgggcattccagtgatgggaattctgctgcttatttggggctactcgcagggcattttcggctctgatgcctccggaattatgcctgccatcgcagcgctcgcgtttgcatcgttggtcacgggttacctgggcaaccggcttgtggtgtcctctgtggtggatccgattcgggaacttcaggaggccatcaacagggttcgtcgtggtgaaaacgatgtgcaggttgatatttatgatggctctgagatcggtgtgcttcaggctggcttcaatgagatgatgcgtggcctgcgtgaacgtcagcgcgtccgtgaccttttcggtcgctacgtgggcgctgaagtggccaagcgtgcgctggaggaacgccccactctgggtggcgaggaccgtaaggttgccgtgttgtttgtcgatgtcatcggctccactacctttgccgtcaaccacactcctgaagaggttgtggaggcgctcaatgagttcttcgagcacgtcgtggaggttgtgcaccgcaacaagggtgttatcaacaagttccagggtgacgcggcgttggcgattttcggcgctcccctgcccctgtctgatgccaccggtcatgcgcttgcggctgcccgtgagctccgcgcagagctgaaagatctccagctcaaggccggaattggtgtggctgctggccatgtcgttgctggtcatatcggcggtcacgcgaggtttgagtacactgtgatcggcgacgcggtgaaccaggctgcgcgcctgacggagatcgcgaaaacgaccccaggccgcaccgtcaccaacgcttccacgctgcgtgaggccaacgaggcggagcaggctcgctggacgctcatgaagtccgtggagctgcgcggacgtagccagatgacgcagattgcgcggcctattcggccgacgttggcggataggtcctaatacgcttttcgacgcaaaaa

SEQ ID NO: 432 - protein, 486 aa, Corynebacterium glutamicum
VLGTNVFGALAVMLFVRFLIPQPDASNFNAEISYLPAVGFAYLAFAIVAGMLVTFLMFRPVLDWQRSPEDHDRNMVRNLVMRIPIYQAILCAVVWLIGIAIATLISASVSTSLALVVAFSTLMAAAIVVLLTYLEAERLVRPVAASALARRFEDSTLEPPVSQRLRMTWLLTLGIPVMGILLLIWGYSQGIFGSDASGIMPAIAALAFASLVTGYLGNRLVVSSVVDPIRELQEAINRVRRGENDVQVDIYDGSEIGVLQAGFNEMMRGLRERQRVRDLFGRYVGAEVAKRALEERPTLGGEDRKVAVLFVDVIGSTTFAVNHTPEEVVEALNEFFEHVVEVVHRNKGVINKFQGDAALAIFGAPLPLSDATGHALAAARELRAELKDLQLKAGIGVAAGHVVAGHIGGHARFEYTVIGDAVNQAARLTEIAKTTPGRTVTNASTLREANEAEQARWTLMKSVELRGRSQMTQIARPIRPTLADRS

SEQ ID NO: 433 - DNA, 1008 bp, Corynebacterium glutamicum
  CDS (101)..(985): RXS01425
agtccctattaatcccaaggagtttcgactcacagtgctcaatttcatttattggccaatttcggccattctgtggttctggcataaagcgttcagctttgtgctgagcccagattccggaattacctgggccttgtcgatcatgttcttgaccttcaccgtgcgtatggttctggtcaagccgatggtcaacaccatgcgttcacagcgcaagatgcaagacatggctccaaagatgcaggccatccgcgagaagtacaaaaatgaccagcagaagatgatggaggagacccgcaaacttcaaaaagaagtgggcgttaaccccatcgcaggctgtttgccaatgttggtgcagatcccagtgttcctgggtctgttccacgtgctgcgctccttcaaccgcaccggttctggcgttggccagctggaaatgaccgttgagcaaaacgcgaacaccccgaactacatcttcggtgtcgacgaggttcagtccttcctgcgtgcagacctgttcggtgcgccactgtcgtcctacatcaccatgcctgctgacgcgttcgacgcgttccttggcctggatgtctcccgcctcaacatcgcgctggttgcagctccaatgattttgatcattgtcgtggcaactcacatgaacgcgcgtctgtccgtcaaccgccaggaagctcgcaaggcagccggcaagcagcaggccgcttccagcgatcagatggccatgcagatgcaaatgatgaacaagatgatgctctggttcatgccagccaccattttgttcaccggcttcatctggaccatcggtcttcttgtctacatgatgtccaacaacgtgtggaccttcttccagcagcgctacatcttcgccaagatggacgctgaggaagcagctgaggaggaggaaaagcgcgcagcaaagcgcactaccgctccaaagcctggcgtgaagccagaaaaccccaagaagcgtaagaagtaaaacttcactaaaaaccgcca

SEQ ID NO: 434 - protein, 295 aa, Corynebacterium glutamicum
VLSPDSGITWALSIMFLTFTVRMVLVKPMVNTMRSQRKMQDMAPKMQAIREKYKNDQQKMMEETRKLQKEVGVNPIAGCLPMLVQIPVFLGLFHVLRSFNRTGSGVGQLEMTVEQNANTPNYIFGVDEVQSFLRADLFGAPLSSYITMPADAFDAFLGLDVSRLNIALVAAPMILIIVVATHMNARLSVNRQEARKAAGKQQAASSDQMAMQMQMMNKMMLWFMPATILFTGFIWTIGLLVYMMSNNVWTFFQQRYIFAKMDAEEAAEEEEKRAAKRTTAPKPGVKPENPKKRKK

SEQ ID NO: 435 - DNA, 1856 bp, Corynebacterium glutamicum
  CDS (1)..(1833): RXS01658
gatccacagatcctgtcaccaaccttcacccagcaacagcagctgcgaaacttctacggtttcccagaccagctggcgatggaccgctttgaagtagatggcaaactccgcgactttgttgtggcagcacgtgagctcgatccaaacgccctgcagcaaaaccagcaggactggattaaccgtcacactgtttatacccacggcaacggcttcattgcagctcaagcaaaccaggtggatgaggtcgcccgcgacgtcggatccactcgtggtggttaccctgtctacaccgtctctgatttgcagtcgaatgctcgtgctgcagaaagcgaagatgctgaggagcttggcatcaaggttgatgagcctcgtgtgtactacggaccactgattgcttctgcgactgatggtgctgactacgcaattgtcggtgacaccggcgatggcccagtcgagtacgacactgacacctccagctacacctacgaaggtgctggcggcgtggacattggaaacatggtcaaccgtgcgatgtttgcattgcgctaccaggaaatgaacatgctcctgtctgatcgtgttggttccgaatccaagatcctatttgagcgcgatcctcgttcccgtgtggaaaaggttgcaccttggttgaccactgactccaagacctacccaactgtgattgatggtcgcatcaagtggatcgtcgatggctacaccaccttggatagtcttccgtactccacgcgcacctcactgacggaagcgactcaggatgctgtcatgcctgacggcaccccacagccactgatcacagatagggtcggttacatccgcaactccgtgaaggctgttgttgatgcgtacgacggaactgttgaactctacgaattcgacaccgaagatcctgttctgaaggcatggcgtggcgtgttcccagacaccgtgaaggacgggtcggagatttccgatgagcttcgcgcacacctgcgttacccagaagatttgttcaaggtccagcgtgacatgctggccaagtacaacgttgatgattctggaacattcttcaccaacgatgcgttctggtctgtcccaggtgacccaactgcagcggagggccgccaggaacttaagcagcctccttactacgtggtggcagcagacccagagaccggtgagtccagcttccagctgatcaccccgttccgtggacttcagcgcgagtacctctctgcacacatgtctgcgtcgtctgatccagttacctacggtgaaatcactgttcgtgtgctgcctaccgattctgtgacccagggtccaaagcaggcccaggatgcgatgatgtcatctgaccaggttgctcaggaccaaacactgtggcgtggatcgaacgatctgcacaacggaaacctgttgaccttgccagttggtggcggagagatcctctacgttgagccgatttactcgcagcgcaaggatcaggcatcggccttcccgaagcttctgcgcgtgctggtcttctacaagggtcaggttggttacgcaccaacgatcgctgaagccctatcgcaggtcggcattgatccgaaggaagcgcaggacatcgaagaggtagatggcaccgctacgacgccatcgactgatgagactgacactgacactgatcagcctgcaaccgaaaccccaactgcaccagtgagtgaggcggaaggaatcgcggccatcaacgatgcgttgagcaaccttgaagctgctcgcgatagctctttcgaagagtatggtcgtgcactcgatgcgcttgatcgtgccgtcgatagctaccagtccgcacagtagcgtttgagtaaacagcccga

SEQ ID NO: 436 - protein, 611 aa, Corynebacterium glutamicum
DPQILSPTFTQQQQLRNFYGFPDQLAMDRFEVDGKLRDFVVAARELDPNALQQNQQDWINRHTVYTHGNGFIAAQANQVDEVARDVGSTRGGYPVYTVSDLQSNARAAESEDAEELGIKVDEPRVYYGPLIASATDGADYAIVGDTGDGPVEYDTDTSSYTYEGAGGVDIGNMVNRAMFALRYQEMNMLLSDRVGSESKILFERDPRSRVEKVAPWLTTDSKTYPTVIDGRIKWIVDGYTTLDSLPYSTRTSLTEATQDAVMPDGTPQPLITDRVGYIRNSVKAVVDAYDGTVELYEFDTEDPVLKAWRGVFPDTVKDGSEISDELRAHLRYPEDLFKVQRDMLAKYNVDDSGTFFTNDAFWSVPGDPTAAEGRQELKQPPYYVVAADPETGESSFQLITPFRGLQREYLSAHMSASSDPVTYGEITVRVLPTDSVTQGPKQAQDAMMSSDQVAQDQTLWRGSNDLHNGNLLTLPVGGGEILYVEPIYSQRKDQASAFPKLLRVLVFYKGQVGYAPTIAEALSQVGIDPKEAQDIEEVDGTATTPSTDETDTDTDQPATETPTAPVSEAEGIAAINDALSNLEAARDSSFEEYGRALDALDRAVDSYQSAQ

SEQ ID NO: 437 - DNA, 867 bp, Corynebacterium glutamicum
  CDS (101)..(844): RXS01677
gtcgccatagttgagttttattcatggcttttagctaggcgactttagttgagggcttttagttgagggcttcccagcagggatggttaaggagaattcagtgaaccaacagagtaaaaagtggctcgtaccgacactggtcgtcatcattgcagtgctcctcatcgcagttgttctgttgatgtaccgaggaaatgcgagtgatacggccgagggcgtttcagccgctgcgacttcggactcggctgctgcttcgactgctgcttcgggttccgcttctggtgctgcggactccgatctgaccagcgtggaagcacgcgacccttccgaccctgttgcggtgggagacgttgatgcacctgttgggttagtggtgttttccgactaccaatgcccgttctgtgcaaagtggagcgatgaaaccctgccacagatgatgaagcatgtggaagatggaaacctccgcattgaatggcgtgaagtgaacatctttggagaaccatctgagcgtggagctcgcgcggcatacgctgcgggtttgcaggacgcatacttggaataccacaacgcactctttgccaacggtgaaaaacccagcgaagacctgctcagcgaagagggacttattaagcttgctggtgaccttggactagacgaatcgaaattcactgccgatttccaatcccctgaaactgcagtcgcaattgcgcaacatcaacagctgggaatcgatcttggcgcctactccaccccagctttcctcctaggtggccagccaatcatgggcgctcagcctgcttctgtatttgaagccgccttcgagcaagcactggcagcgaaagaataaaccgtggatgtcggcctagt

SEQ ID NO: 438 - protein, 248 aa, Corynebacterium glutamicum
VNQQSKKWLVPTLVVIIAVLLIAVVLLMYRGNASDTAEGVSAAATSDSAAASTAASGSASGAADSDLTSVEARDPSDPVAVGDVDAPVGLVVFSDYQCPFCAKWSDETLPQMMKHVEDGNLRIEWREVNIFGEPSERGARAAYAAGLQDAYLEYHNALFANGEKPSEDLLSEEGLIKLAGDLGLDESKFTADFQSPETAVAIAQHQQLGIDLGAYSTPAFLLGGQPIMGAQPASVFEAAFEQALAAKE

SEQ ID NO: 439 - DNA, 1095 bp, Corynebacterium glutamicum
  CDS (101)..(1072): RXS02932
cactactgcgttaaggtatgaaagttcgcacaccagcgatttaattctgtgcccaccactagcacgaccatttcagttttaactttcttggagttttctagtgtccaaaacagaagaaggccgttcagcggccataattatttacgcgtttccaactttcattctgctgggcgcgatcattgcgtttatcttcccggaaccattcattccgctgacaaactacattaatatcttcctcacgatcatcatgttcaccatgggtttgaccttgacggtgcccgattttcagatggtgcttaaacgtccactgcctatcttgatcggtgtagtagcgcagtttgtcatcatgccattcctggcgatcgtggttgcgaaaatgttcaacctcaacccagcactcgccgttggccttctcatgctgggatccgttccgggtggcacctcctccaatgtgattgcgtttctcgcccgaggagatgtcgcgctatcggtcaccatgacctctgtgtccaccattgtttccccaatcatgacgcctttcctcatgctcatgctggcaggtactgaaaccgccgtcgatggtggaggcatggcgtggactttggtacaaacagtgctgctgcctgtgatcatcggcctagttctgcgtgtcttcttgaacaagtggatcgacaagattttgccgatccttccttatctctccatcctcggtatcggtggcgtggtgttcggcgcagtcgcagccaacgcggaacgactcgtgtctgtcggactcatcgtgttcgttgcagttatcgtgcacaacgtacttggatacgttgtgggatacctcaccggccgtgtattcaaattcccagaagcagcaaaccgcaccatggcgattgaaatcggaacccaatccgcaggcctcgcatcgggaatggcaggacgattcttcaccccagaagcagcccttccaggtgctgtcgctgccttggtccacaacatcaccggcgcagtttatgttgggctggtacgaaacaggcctttgactaaggcatcaaggaagaaggaatccgtcgcggtttccagctaacttatttgctgcccgttaga

SEQ ID NO: 440 - protein, 324 aa, Corynebacterium glutamicum
VSKTEEGRSAAIIIYAFPTFILLGAIIAFIFPEPFIPLTNYINIFLTIIMFTMGLTLTVPDFQMVLKRPLPILIGVVAQFVIMPFLAIVVAKMFNLNPALAVGLLMLGSVPGGTSSNVIAFLARGDVALSVTMTSVSTIVSPIMTPFLMLMLAGTETAVDGGGMAWTLVQTVLLPVIIGLVLRVFLNKWIDKILPILPYLSILGIGGVVFGAVAANAERLVSVGLIVFVAVIVHNVLGYVVGYLTGRVFKFPEAANRTMAIEIGTQSAGLASGMAGRFFTPEAALPGAVAALVHNITGAVYVGLVRNRPLTKASRKKESVAVSS

SEQ ID NO: 441 - DNA, 844 bp, Corynebacterium glutamicum
  CDS (101)..(844): FRXA02402
cactactgcgttaaggtatgaaagttcgcacaccagcgatttaattctgtgcccaccactagcacgaccatttcagttttaactttcttggagttttctagtgtccaaaacagaagaaggccgttcagcggccataattatttacgcgtttccaactttcattctgctgggcgcgatcattgcgtttatcttcccggaaccattcattccgctgacaaactacattaatatcttcctcacgatcatcatgttcaccatgggtttgaccttgacggtgcccgattttcagatggtgcttaaacgtccactgcctatcttgatcggtgtagtagcgcagtttgtcatcatgccattcctggcgatcgtggttgcgaaaatgttcaacctcaacccagcactcgccgttggccttctcatgctgggatccgttccgggtggcacctcctccaatgtgattgcgtttctcgcccgaggagatgtcgcgctatcggtcaccatgacctctgtgtccaccattgtttccccaatcatgacgcctttcctcatgctcatgctggcaggtactgaaaccgccgtcgatggtggaggcatggcgtggactttggtacaaacagtgctgctgcctgtgatcatcggcctagttctgcgtgtcttcttgaacaagtggatcgacaagattttgccgatccttccttatctctccatcctcggtatcggtggcgtggtgttcggcgcagtcgcagccaacgcggaacgactcgtgtctgtcggactcatcgtgttcgttgcagttatcgtgcacaacgtacttggatacgttgtgggatacctcaccggccgtgta

SEQ ID NO: 442 - protein, 248 aa, Corynebacterium glutamicum
VSKTEEGRSAAIIIYAFPTFILLGAIIAFIFPEPFIPLTNYINIFLTIIMFTMGLTLTVPDFQMVLKRPLPILIGVVAQFVIMPFLAIVVAKMFNLNPALAVGLLMLGSVPGGTSSNVIAFLARGDVALSVTMTSVSTIVSPIMTPFLMLMLAGTETAVDGGGMAWTLVQTVLLPVIIGLVLRVFLNKWIDKILPILPYLSILGIGGVVFGAVAANAERLVSVGLIVFVAVIVHNVLGYVVGYLTGRV

SEQ ID NO: 443 - DNA, 1389 bp, Corynebacterium glutamicum
  CDS (101)..(1366): RXS00654
cagcaatagcgattattgcttgattgtgtgtttttagatcttcggttctcttcactcaactgctgtgaagtgccacctgtttggaaaggcgaacacgatagtgctcgatattttgatttacccggtgtctggagtgatgaagctgtggcacctgcttcttcacaacgttgcgggtttggacgattcactggcgtggttcttttcccttttcggccttgtcatcacgatccgtgcaattatcgcgcctttcacctggcagatgtataagtcgggccgcactgccgcacatattcgtcctcaccgcgctgcgctccgggaagaatacaagggaaagtacgatgaagcgtccattcgggagttgcagaagcgccagaatgatttgaataaggaatacggcattaacccgctggcaggttgtgtgcctgggctgatccagataccgattgtccttggtctttactgggcacttctccgcatggctcgccctgaaggtggtttggaaaatcccgtcttccagtcgatcggcttcctaactcctgaggaagtggaatctttcctcgctggtcgcgtgagcaatgtgcctctgcccgcttatgtttcgatgcccactgagcagctaaaatatttgagcaccacgcaggcggaagttcttagtttcgttttgccactgttcatcacagccgcaatcctcaccgcaatcaacatggcgatgtccatgtaccgcagcttccaaaccaacgattacgcatccggattctctaacggcatgctgaagttcatgatcgtgatgtcgatcctcgcgccgatcttcccactgtcccttggcctcacaggaccattccccacagcaatcgcactctattgggtcagcaacaacctgtggacgctcctccaaacaatcatcatgatggtcattttggaacgcaaatacccacttaccgacgatttcaaagtgcaccacctagagcagcgcgacatctaccgcgcaaaacaaaaagaaaagcgcatcttcctgtggacacgacgcaaaaaccgcgccctgatgattctcaccccatggaacgcctcaacgcttcacgcaacaaacgtggaactcaccaaaacccgtactgccgaaatcaacgaagcaaaacaggcccgcaaagaaatcgcgaacaagaggcgcgaaacgcaacgtgaaatgaaccgcgccgccatgcagcgcttaaagcagcgtcgcgctgaggttaaagctaaaaagaaggggcttatcgacgcctcccccaacgaagataccccttcggaaaatgaagaaactaaattgagtagtccgcaggtggagccgacaacaactgccgagccaaatcgcgagccgtctcaagaggactgatgttgtggaccaatcgagat

SEQ ID NO: 444 - protein, 422 aa, Corynebacterium glutamicum
VLDILIYPVSGVMKLWHLLLHNVAGLDDSLAWFFSLFGLVITIRAIIAPFTWQMYKSGRTAAHIRPHRAALREEYKGKYDEASIRELQKRQNDLNKEYGINPLAGCVPGLIQIPIVLGLYWALLRMARPEGGLENPVFQSIGFLTPEEVESFLAGRVSNVPLPAYVSMPTEQLKYLSTTQAEVLSFVLPLFITAAILTAINMAMSMYRSFQTNDYASGFSNGMLKFMIVMSILAPIFPLSLGLTGPFPTAIALYWVSNNLWTLLQTIIMMVILERKYPLTDDFKVHHLEQRDIYRAKQKEKRIFLWTRRKNRALMILTPWNASTLHATNVELTKTRTAEINEAKQARKEIANKRRETQREMNRAAMQRLKQRRAEVKAKKKGLIDASPNEDTPSENEETKLSSPQVEPTTTAEPNREPSQED

SEQ ID NO: 445 - DNA, 18 bp, Artificial Sequence
  Description of Artificial Sequence: primer
ggaaacagtatgaccatg

SEQ ID NO: 446 - DNA, 17 bp, Artificial Sequence
  Description of Artificial Sequence: primer
gtaaaacgacggccagt

1. An isolated nucleic acid molecule selected from the group consisting of
a) an isolated nucleic acid molecule from Corynebacterium glutamicum encoding an MCT protein, provided that the nucleic acid molecule does not consist of any of the F-designated genes set forth in Table 1, or a complement thereof;
b) an isolated Corynebacterium glutamicum nucleic acid molecule comprising a nucleotide sequence selected from the group consisting of those sequences set forth in Appendix A, provided that the nucleic acid molecule does not consist of any of the F-designated genes set forth in Table 1, or a complement thereof;
c) an isolated nucleic acid molecule which encodes a polypeptide comprising an amino acid sequence selected from the group consisting of those sequences set forth in Appendix B, provided that the nucleic acid molecule does not consist of any of the F-designated genes set forth in Table 1, or a complement thereof;
d) an isolated nucleic acid molecule which encodes a naturally occurring allelic variant of a polypeptide comprising an amino acid sequence selected from the group consisting of those sequences set forth in Appendix B, provided that the nucleic acid molecule does not consist of any of the F-designated genes set forth in Table 1, or a complement thereof;
e) an isolated nucleic acid molecule comprising a nucleotide sequence which is at least 50% identical to an entire nucleotide sequence selected from the group consisting of those sequences set forth in Appendix A, provided that the nucleic acid molecule does not consist of any of the F-designated genes set forth in Table 1, or a complement thereof; and
f) an isolated nucleic acid molecule comprising a fragment of at least 15 contiguous nucleotides of a nucleotide sequence selected from the group consisting of those sequences set forth in Appendix A, provided that the nucleic acid molecule does not consist of any of the F-designated genes set forth in Table 1, or a complement thereof.

2. The isolated nucleic acid molecule of claim 1, wherein said nucleic acid molecule from Corynebacterium glutamicum encodes an MCT protein involved in the production of a fine chemical.

3. An isolated nucleic acid molecule comprising the nucleic acid molecule of claim 1 and a nucleotide sequence encoding a heterologous polypeptide.

4. A vector comprising the nucleic acid molecule of claim 1.

5. The vector of claim 4, which is an expression vector.

6. A host cell transfected with the expression vector of claim 5.

7. The host cell of claim 6, wherein said cell is a microorganism.

8. The host cell of claim 7, wherein said cell belongs to the genus Corynebacterium or Brevibacterium.

9. A method of producing a polypeptide comprising culturing the host cell of claim 6 in an appropriate culture medium to, thereby, produce the polypeptide.

10. A method for producing a fine chemical, comprising culturing the cell of claim 6 such that the fine chemical is produced.

11. The method of claim 10, wherein said method further comprises the step of recovering the fine chemical from said culture.

12. The method of claim 10, wherein said cell belongs to the genus Corynebacterium or Brevibacterium.

13. The method of claim 10, wherein said cell is selected from the group consisting of Corynebacterium glutamicum, Corynebacterium herculis, Corynebacterium, lilium, Corynebacterium acetoacidophilum, Corynebacterium acetoglutamicum, Corynebacterium acetophilum, Corynebacterium ammoniagenes, Corynebacterium fujiokense, Corynebacterium nitrilophilus, Brevibacterium ammoniagenes, Brevibacterium butanicum, Brevibacterium divaricatum, Brevibacterium flavum, Brevibacterium healii, Brevibacterium ketoglutamicum, Brevibacterium ketosoreductum, Brevibacterium lactofermentum, Brevibacterium linens, Brevibacterium paraffinolyticum, and those strains set forth in Table 3.

14. The method of claim 10, wherein expression of the nucleic acid molecule from said vector results in modulation of production of said fine chemical.

15. The method of claim 10, wherein said fine chemical is selected from the group consisting of organic acids, proteinogenic and nonproteinogenic amino acids, purine and pyrimidine bases, nucleosides, nucleotides, lipids, saturated and unsaturated fatty acids, diols, carbohydrates, aromatic compounds, vitamins, cofactors, polyketides, and enzymes.

16. The method of claim 10, wherein said fine chemical is an amino acid selected from the group consisting of lysine, glutamate, glutamine, alanine, aspartate, glycine, serine, threonine, methionine, cysteine, valine, leucine, isoleucine, arginine, proline, histidine, tyrosine, phenylalanine, and tryptophan.

17. An isolated polypeptide selected from the group consisting of
a) an isolated MCT polypeptide from Corynebacterium glutamicum;
b) an isolated polypeptide comprising an amino acid sequence selected from the group consisting of those sequences set forth in Appendix B, provided that the amino acid sequence is not encoded by any of the F-designated genes set forth in Table 1;
c) an isolated polypeptide comprising a naturally occurring allelic variant of a polypeptide comprising an amino acid sequence selected from the group consisting of those sequences set forth in Appendix B, provided that the amino acid sequence is not encoded by any of the F-designated genes set forth in Table 1;
d) an isolated polypeptide which is encoded by a nucleic acid molecule comprising a nucleotide sequence which is at least 50% identical to an entire nucleotide sequence selected from the group consisting of those sequences set forth in Appendix A, provided that the nucleic acid molecule does not consist of any of the F-designated genes set forth in Table 1;
e) an isolated polypeptide comprising an amino acid sequence which is at least 50% identical to an entire amino acid sequence selected from the group consisting of those sequences set forth in Appendix B, provided that the amino acid sequence is not encoded by any of the F-designated genes set forth in Table 1; and
f) an isolated polypeptide comprising a fragment of a polypeptide comprising an amino acid sequence selected from the group consisting of those sequences set forth in Appendix B, provided that the amino acid sequence is not encoded by any of the F-designated genes set forth in Table 1, wherein said polypeptide fragment maintains a biological activity of the polypeptide comprising the amino sequence.

18. The isolated polypeptide of claim 17, wherein said polypeptide is involved in the production of a fine chemical.

19. The isolated polypeptide of claim 17, further comprising heterologous amino acid sequences.

20. A method for diagnosing the presence or activity of Corynebacterium diphtheriae in a subject, comprising detecting the presence of at least one of the nucleic acid molecules of claim 1, thereby diagnosing the presence or activity of Corynebacterium diphtheriae in the subject.

21. A method for diagnosing the presence or activity of Corynebacterium diphtheriae in a subject, comprising detecting the presence of at least one of the polypeptide molecules of claim 17, thereby diagnosing the presence or activity of Corynebacterium diphtheriae in the subject.

22. A host cell comprising a nucleic acid molecule selected from the group consisting of
a) a nucleic acid molecule set forth in Appendix A, wherein the nucleic acid molecule is disrupted by at least one technique selected from the group consisting of a point mutation, a truncation, an inversion, a deletion, an addition, a substitution and homologous recombination;
b) a nucleic acid molecule set forth in Appendix A, wherein the nucleic acid molecule comprises one or more nucleic acid modifications as compared to the sequence set forth in Appendix A, wherein the modification is selected from the group consisting of a point mutation, a truncation, an inversion, a deletion, an addition and a substitution; and
c) a nucleic acid molecule set forth in Appendix A, wherein the regulatory region of the nucleic acid molecule is modified relative to the wild-type regulatory region of the molecule by at least one technique selected from the group consisting of a point mutation, a truncation, an inversion, a deletion, an addition, a substitution and homologous recombination.
